(19) United States
(12) Patent Application Publication
(10) Pub. No.: US 2024/0425598 A1
(43) Pub. Date: Dec. 26, 2024

(54) RECEPTOR-MEDIATED DELIVERY OF NUCLEIC ACIDS

(71) Applicants: KODIKAZ THERAPEUTIC SOLUTIONS, INC., New York, NY (US); EMORY UNIVERSITY, Atlanta, GA (US)

(72) Inventors: Anthony JOHNSON, Long Island City, NY (US); Leon BERNAL-MIZRACHI, Atlanta, GA (US); Munevver CINAR, Brookhaven, GA (US)

(21) Appl. No.: 18/735,738

(22) Filed: Jun. 6, 2024

Related U.S. Application Data
(63) Continuation of application No. PCT/US22/81039, filed on Dec. 6, 2022.
(60) Provisional application No. 63/286,915, filed on Dec. 7, 2021.
(60) Provisional application No. 63/369,908, filed on Jul. 29, 2022.

(51) Int. Cl. C07K 16/28; C07K 16/44

(52) U.S. Cl. CPC C07K 16/2833; C07K 16/44; C07K 2317/76

(57) ABSTRACT

Methods disclosed herein relate to receptor-mediated uptake of circulating tumor DNA (ctDNA) and derivatives thereof, including synthetic delivery systems. Provided are methods of identifying a receptor that mediates or is associated with uptake of ctDNA, methods of reducing ctDNA uptake by target cells, methods of determining an expression level of a receptor associated with uptake of ctDNA, and methods of treatment that can be based on an expression level of the receptor.

### CROSS REFERENCE

[0001] This application is a continuation of International Application No. PCT/US22/81039, filed Dec. 6, 2022, which claims the benefit of U.S. Provisional Patent Application No. 63/369,908, filed Jul. 29, 2022, and U.S. Provisional Patent Application No. 63/286,915, filed Dec. 7, 2021, each of which is incorporated herein by reference in its entirety.

### SEQUENCE LISTING

[0002] The instant application contains a Sequence Listing which has been submitted electronically in XML format and is hereby incorporated by reference in its entirety. Said XML copy, created on Jun. 5, 2024, is named 54774_706_301_SL.txt and is 1,032,708 bytes in size.

### INCORPORATION BY REFERENCE

[0003] All publications, patents, and patent applications mentioned in this specification are herein incorporated by reference to the same extent as if each individual publication, patent, or patent application was specifically and individually indicated to be incorporated by reference.

### BACKGROUND

[0004] Tumor-derived cell-free DNA can contain genetic alterations relevant to tumorigenesis, suggesting circulating tumor-derived DNA (ctDNA) serves as a vehicle for genetic exchange between tumor cells. It has been suggested that ctDNA can transfer oncogenic gene mutations for reshaping the tumor microenvironment. However, the underlying process and mechanisms remain poorly understood.

### BRIEF DESCRIPTION OF THE DRAWINGS

[0005] FIG. 1A shows the percent of MMI1s multiple myeloma cells, MIA pancreatic cancer cells, and HCT116 colon cancer cells that were positive for ctDNA signal after incubation with CY5 labelled-ctDNA from multiple myeloma patients (A, D, E), pancreatic cancer patients (G, I, F), or colon cancer patients (KLM), with (+T) or without (−T) trypsin treatment to cleave cell surface-exposed membrane proteins.

[0006] FIG. 1B shows representative flow cytometry scatterplots of MMIs multiple myeloma cells, MIA pancreatic cancer cells, and HCT116 colon cancer cells after incubation with CY5 labelled-ctDNA from a patient with a corresponding type of cancer, with or without trypsin treatment to cleave cell surface-exposed membrane proteins.

[0007] FIG. 2 shows the effect of pre-incubating ctDNA from multiple myeloma (MM) or pancreatic cancer (PC) patients with anti-dsDNA antibodies (SLE1, SLE2) or IgG isotype control antibodies (IgG) on nuclear localization of ctDNA. CY5-labelled ctDNA was incubated with 1 g/mL of anti-dsDNA antibodies for 24 hours, then added to cultures of cell lines of the same cell type as the ctDNA's tissue of origin (MMIs—multiple myeloma; MIA—pancreatic cancer). 24 hours later, samples were imaged and the nuclear intensity of ctDNA determined.

[0008] FIG. 3 outlines an experiment to identify proteins that can function as ctDNA recognizing receptors.

[0009] FIG. 4 provides illustrative membrane proteins identified as candidates that bind to ctDNA by a pull down and mass spectrometry assay.

[0010] FIG. 5 shows confocal fluorescence microscopy images of PANC-1 pancreatic cancer cells that were pre-incubated with anti-HLA antibody (right panel) or IgG isotype control antibody (left panel), then treated with rhodamine labelled ctDNA from a pancreatic cancer patient.

[0011] FIG. 6A and FIG. 6B show representative fluorescence microcopy images of IMIs cells treated with rhodamine-labelled ctDNA with or without pre-treatment with anti-HLA-A antibody or an IgG isotype control.

[0012] FIG. 6C shows the average nuclear intensity of ctDNA (rhodamine-labelled) for HLA positive cells (left) or HLA negative IMIs cells (right) that were pre-treated for 4 hours with titrating doses of anti-HLA-A antibody or IgG isotype control (doses: 0, 0.25, 0.5, or 1 μg/mL), after which rhodamine-labeled ctDNA was added to the culture wells at 1 μg/mL for 24 hours. Cells were fixed and stained with a fluorescent secondary antibody to stain HLA-A-expressing cells and differentiate them from cells that were HLA-A negative.

[0013] FIG. 7 shows the level of rhodamine-labelled multiple myeloma ctDNA in the nuclei of MMIs cells treated with antibodies against CD41, CD97, Integrin αVβ5 (Int-P1F6), P142A, TMEM, or PTK7A. Data are shown for cells that stained positive for the anti-receptor antibodies after labelling with an AF488-conjugated secondary antibody.

[0014] FIG. 8A shows the results of an Amplified Luminescent Proximity Homogeneous Assay (ALPHA) for ctDNA-receptor binding performed on multiple myeloma cell lines (e.g., MM1s, OPM1, RPMI, JK6L) with multiple myeloma ctDNA. Increases in the IgG/biotin ratio of more than threefold were considered indicative of a receptor that bound to multiple myeloma ctDNA.

[0015] FIG. 8B shows the results of an Amplified Luminescent Proximity Homogeneous Assay (ALPHA) for ctDNA-receptor binding performed on multiple myeloma cell lines (e.g., MM1s, OPM1, RPMI, JK6L) and non-myeloma cell lines (e.g., MIA, HTC116, A549, MDA-MD-468) with multiple myeloma ctDNA. Increases in the IgG/biotin ratio of more than threefold were considered indicative of a receptor that bound to multiple myeloma ctDNA.

[0016] FIG. 9 shows competitive inhibition of labeled ctDNA or synthetic delivery system polynucleotide uptake by co-treatment with unlabeled ctDNA or synthetic delivery system polynucleotide.

[0017] FIG. 10 shows the results of a fluorescence microscopy assay demonstrating colocalization of ctDNA with APLP2, PKP4, or HLA-A at the cell membrane.

### SUMMARY

[0018] Disclosed herein, in some aspects, is a method of reducing uptake of circulating tumor-derived DNA (ctDNA) by target cells in a subject, the method comprising administering to the subject an antagonist of a receptor that is associated with cellular uptake of the ctDNA, thereby reducing the uptake of the ctDNA by the target cells in the subject.

[0019] Disclosed herein, in some aspects, is a method of reducing uptake of circulating tumor-derived DNA (ctDNA) by target cells, the method comprising contacting the target cells with an antagonist of a receptor that is associated with uptake of the ctDNA, thereby reducing the uptake of the ctDNA by the target cells.

[0020] Disclosed herein, in some aspects, is a method comprising determining that a biological sample from a subject expresses a receptor that is associated with uptake of ctDNA at a level that is associated with the uptake of the ctDNA.

[0021] Disclosed herein, in some aspects, is a method of treating a condition in a subject in need thereof, the method comprising administering a therapeutically-effective amount of a therapeutic agent to the subject, wherein the administering is based at least in part on a result of an assay performed on a biological sample from the subject, wherein the assay determined that a receptor associated with uptake of ctDNA is expressed in the biological sample at a level that is associated with the uptake of the ctDNA.

[0022] Disclosed herein, in some aspects, is a method of identifying a receptor that mediates uptake of a cargo by a target cell, the method comprising: (a) isolating ctDNA or a derivative thereof that is bound to the receptor or a fragment thereof; and (b) identifying the receptor.

[0023] Disclosed herein, in some aspects, is a method of delivering a cargo to a target cell, the method comprising contacting a receptor on the target cell with a synthetic delivery system that comprises a polynucleotide, thereby inducing uptake of the cargo by the target cell, wherein: (a) the polynucleotide comprises a first nucleic acid sequence identified in circulating tumor DNA (ctDNA) from a substantially similar cell type as the target cell; and (b) the receptor comprises an armadillo-like protein, an APP (amyloid precursor protein) family member, a p120(ctn)/plakophilin subfamily member, an NMC protein, a GPCR, an adhesion protein, a tyrosine phosphatase, an integrin, an ion channel, a mineral transporter, a nutrient transporter, or an ATPase.

### DETAILED DESCRIPTION

[0024] Compositions and methods provided herein relate to receptor-mediated cellular uptake of nucleic acids, for example, uptake of circulating tumor DNA/circulating tumor-derived DNA (ctDNA) and synthetic delivery systems derived therefrom.

[0025] ctDNA can target and transmit genetic material to target cells that resemble the ctDNA's cell of origin. For example, ctDNA can be internalized by target cells, transported to the nucleus, and integrated into the genome of the target cells. The transfer of ctDNA to target cells has been associated with, for example, induction or transfer of resistance or sensitivity of a cancer to anti-cancer agents, such as chemotherapeutic drugs.

[0026] Disclosed herein are receptors that mediate binding to and/or internalization of ctDNA by target cells, and related compositions and methods.

[0027] Antagonists of receptors disclosed herein can be used to reduce uptake of ctDNA by target cells. Blocking uptake of ctDNA by target cells (e.g., cancer cells, or cells of a similar cell type as the cancer cells) can be useful, for example, for delaying or reducing resistance of cancer cells to anti-cancer therapeutic agents, such as chemotherapeutic drugs. An antagonist (e.g., an antibody or antigen-binding fragment thereof) can be contacted to a target cell and can bind to the receptor on the target cell, thereby reducing uptake of ctDNA by the target cell. An antagonist can be administered to a subject to inhibit cancer progression, cancer metastasis, or resistance of the cancer to anti-cancer therapeutic agents, for example.

[0028] Receptors disclosed herein can be targeted to induce uptake of a ctDNA or synthetic delivery system. Synthetic delivery systems disclosed herein can utilize polynucleotides to facilitate binding, uptake, nuclear trafficking, and/or genomic integration of a component of the synthetic delivery system, for example, a cargo. The synthetic delivery system can be used for delivery of a cargo to cells that express the receptor, including cancer cells and/or specific cell types.

[0029] A therapeutic agent, for example, comprising a synthetic delivery system, can be administered to a subject on the basis of whether target cells in the subject express a receptor associated with uptake of ctDNA at a level that is associated with uptake of the ctDNA. For example, a biological sample (e.g., blood sample, cancer cell sample, or tissue (e.g., cancer) biopsy) from a subject can be assayed for expression of the receptor, and a therapeutic agent comprising a synthetic delivery system can be administered to the subject if the corresponding receptor for the synthetic delivery system is detected as expressed at least at a suitable level.

[0030] Also disclosed herein are methods of identifying receptors that mediate uptake of ctDNA or a derivative thereof by a target cell, and various related assays, for example, assays for confirming binding of a candidate receptor to ctDNA or a synthetic delivery system derived therefrom, assays for evaluating a role of the receptor in uptake of the ctDNA or synthetic delivery system, assays for determining expression levels of the receptor in biological samples, and assays for determining whether the receptor is expressed at a level that is associated with uptake of the ctDNA.

[0031] Methods disclosed herein can also comprise delivering a cargo to a target cell. For example, a target cell can comprise a receptor, and uptake of the cargo by the target cell can be induced by contacting the receptor on the target cell with a synthetic delivery system and/or polynucleotide disclosed herein.

### Receptors

[0032] Compositions and methods disclosed herein can utilize receptors. Methods of the disclosure can comprise, for example, reducing uptake of ctDNA by contacting a target cell with an antagonist of the receptor, delivering a cargo to a target cell by contacting a receptor with a synthetic delivery system or a polynucleotide that binds to the receptor, assaying a level of a receptor expressed in a biological sample, and/or administering an agent that binds to and/or induces uptake via a receptor based on an expression level of the receptor in the biological sample. Methods disclosed herein can comprise identifying a receptor that can be used to deliver a cargo to a target cell.

[0033] A receptor can be expressed by a target cell disclosed herein. In some embodiments, expression of the receptor is specific to a target cell, target cell type, or target cell population, thereby facilitating specific delivery of a cargo to the target cell, target cell type, or target cell population. In some embodiments, expression of the receptor is relatively higher on a target cell, target cell type, or target cell population than a control cell, control cell type, or control cell population, thereby facilitating delivery of a cargo to the target cell, target cell type, or target cell population.

[0034] In some embodiments, expression of the receptor is not specific to a target cell, target cell type, or target cell population. In some embodiments, expression of the receptor is not relatively higher on a target cell, target cell type, or target cell population than a control cell, control cell type, or control cell population. In some embodiments, delivery of a cargo to a target cell, target cell type, or target cell population is higher than delivery to a control cell, control cell type, or control cell population even though expression of the receptor is not higher or is substantially similar on the target cell, target cell type, or target cell population than the control cell, control cell type, or control cell population. For example, the receptor can exhibit a different activity despite similar expression, or additional receptors, adaptor proteins, or cooperative factors can contribute to uptake of the cargo by the target cells in combination with the receptor.

[0035] Binding of a synthetic delivery system or a polynucleotide to a receptor disclosed herein can induce uptake of the synthetic delivery system, polynucleotide, or cargo associated therewith by, for example, endocytosis, receptor-mediated endocytosis, clathrin-dependent endocytosis, caveolae-dependent endocytosis, CLIC/GEEC pathway uptake, lipid-raft associated endocytosis, phagocytosis, macropinocytosis, micropinocytosis, pinocytosis, or endosomal recycling, e.g., of MHC, such as HLA-A.

[0036] A receptor can be or can comprise a MHC protein or a component thereof. A receptor can be or can comprise a human leukocyte antigen or a component thereof. A receptor can be or can comprise a class I MHC protein or a component thereof. For example, a receptor can be or can comprise HLA-A or a component thereof. A receptor can be or can comprise a protein that interacts with MHC class I molecules, for example, APLP2.

[0037] A receptor can be or can comprise a G-protein coupled receptor (GPCR) or a component thereof. The GPCR can be a class A (rhodopsin-like), class B (e.g., secretin and adhesion subfamilies), class C (glutamate), or class F (Frizzled) family or subfamily GPCR. A GPCR can be a GPCR that elicits a cyclic adenosine 3,5-monophosphate (cAMP) response, calcium mobilization, or phosphorylation of extracellular regulated protein kinases 1/2 (pERK1/2). For example, a receptor can be or can comprise CD97 or a component thereof.

[0038] A receptor can be or can comprise an adhesion protein or a component thereof. For example, a receptor can be or can comprise CD97 or a component thereof, PTK7 or a component thereof, ITGB5 or a component thereof, ITGA2B or a component thereof, or αVβ5 integrin or a component thereof.

[0039] A receptor can be or can comprise an integrin or a component thereof. A receptor can be or can comprise, for example, ITGB5 or a component thereof, ITGA2B or a component thereof, or αVβ5 integrin or a component thereof.

[0040] A receptor can be or can comprise a tyrosine phosphatase or a component thereof. A receptor can be or can comprise a protein tyrosine phosphatase or a component thereof. A receptor can be or can comprise a protein tyrosine phosphatase receptor or a component thereof. A receptor can be or can comprise, for example, PTPRF or a component thereof.

[0041] A receptor can be or can comprise an ion channel or a component thereof. A receptor can comprise a sensory neuron ion channel, such as a nociceptor ion channel. A receptor can comprise a function in mechanosensation. A receptor can be or can comprise, for example, TMEM120A or a component thereof.

[0042] A receptor can be or can comprise a mineral transporter or a component thereof. A receptor can be or can comprise a ferroxidase or a component thereof. A receptor can be or can comprise, for example, ceruloplasmin or a component thereof.

[0043] A receptor can be or can comprise a metalloprotein or a component thereof. A receptor can be or can comprise, for example, ceruloplasmin or a component thereof.

[0044] A receptor can be or can comprise a nutrient transporter or a component thereof. A receptor can be or can comprise a monocarboxylate transporter or a component thereof. A receptor can be or can comprise, for example, SLC16A1 or a component thereof. A receptor can be or can comprise an amino acid transporter or a component thereof. A receptor can be or can comprise, for example, SLC7A5 or a component thereof.

[0045] A receptor can be or can comprise a receptor of fibronectin, fibrinogen, plasminogen, prothrombin, thrombospondin, vitronectin, or a combination thereof. For example, a receptor can be or can comprise ITGA2B or a component thereof.

[0046] A receptor can be or can comprise an ATPase or a component thereof. A receptor can be or can comprise a sodium/potassium transporting ATPase or a component thereof. A receptor can be or can comprise, for example, ATP1B1 or a component thereof. A receptor can be or can comprise a calcium transporter or a component thereof. A receptor can be or can comprise an ion transporting ATPase or a component thereof. A receptor can be, for example, ATP2B4 or a component thereof.

[0047] A receptor can be or can comprise an Armadillo-like protein, for example, comprising one or more armadillo repeats. A receptor can be or can comprise a member of a p120(ctn)/plakophilin subfamily of Armadillo-like proteins, including for example CTNND1, CTNND2, PKP1, PKP2, PKP4, or ARVCF. In some embodiments a receptor is PKP4.

[0048] A receptor can be or can comprise an APP (amyloid precursor protein) family member, for example, APP, APLP1, or APLP2. In some embodiments, a receptor is APLP2.

[0049] A receptor can be or can comprise a kinase. A receptor can be or can comprise a lipid kinase. A receptor can be or can comprise a Phosphatidylinositol kinase. A receptor can be or can comprise a phosphatidylinositol-5-phosphate 4-kinase family member. A receptor can be capable of catalyzing the phosphorylation of phosphatidylinositol-5-phosphate on the fourth hydroxyl of the myo-inositol ring to form phosphatidylinositol-5,4-bisphosphate. A receptor can be or can comprise PIP4K2A.

[0050] A receptor can be or can comprise P142A or a component thereof.

[0051] In some embodiments, a particular cargo or type of cargo disclosed herein can be delivered by targeting a synthetic delivery system to a receptor or type of receptor disclosed herein, for example, targeting via a polynucleotide and/or recognition sequence.

[0052] In some embodiments, targeting a synthetic delivery system to a receptor or type of receptor disclosed herein can increase specific binding, uptake, nuclear localization, and/or genomic integration of the synthetic delivery system, polynucleotide, and/or cargo by target cells relative to control cells.

[0053] In some embodiments, a receptor comprises, consists essentially of, or consists of a single protein, receptor, or subunit disclosed herein, for example, APLP2, PKP4, HLA-A, CD41, CD97, ITGB5, ITGA2B, Integrin αVβ5, PI4K2A, TMEM120A, PTK7A, Ceruloplasmin, PTPRF, SLC16A1, SLC7A5, ATP1B1, ATP2B4, P142A, or PIP4K2A.

[0054] In some embodiments, the receptor comprises, consists essentially of, or consists of APLP2. In some embodiments, the receptor comprises, consists essentially of, or consists of PKP4. In some embodiments, the receptor comprises, consists essentially of, or consists of HLA-A. In some embodiments, the receptor comprises, consists essentially of, or consists of CD41. In some embodiments, the receptor comprises, consists essentially of, or consists of CD97. In some embodiments, the receptor comprises, consists essentially of, or consists of Integrin αVβ5. In some embodiments, the receptor comprises, consists essentially of, or consists of PI4K2A. In some embodiments, the receptor comprises, consists essentially of, or consists of TMEM120A. In some embodiments, the receptor comprises, consists essentially of, or consists of PTK7A. In some embodiments, the receptor comprises, consists essentially of, or consists of Ceruloplasmin. In some embodiments, the receptor comprises, consists essentially of, or consists of PTPRF. In some embodiments, the receptor comprises, consists essentially of, or consists of SLC16A1. In some embodiments, the receptor comprises, consists essentially of, or consists of SLC7A5. In some embodiments, the receptor comprises, consists essentially of, or consists of ATP1B1. In some embodiments, the receptor comprises, consists essentially of, or consists of ATP2B4. In some embodiments, the receptor comprises, consists essentially of, or consists of P142A. In some embodiments, the receptor comprises, consists essentially of, or consists of PIP4K2A.

[0055] In some embodiments, a receptor comprises, consists essentially of, or consists of two proteins or subunits disclosed herein, or two receptors, proteins, or subunits contribute to uptake, for example, two of APLP2, PKP4, HLA-A, CD41, CD97, Integrin αVβ5, PI4K2A, TMEM120A, PTK7A, Ceruloplasmin, PTPRF, SLC16A1, SLC7A5, ATP1B1, ATP2B4, P142A, and PIP4K2A. In some embodiments, a receptor comprises, consists essentially of, or consists of APLP2 and PKP4. In some embodiments, a receptor comprises, consists essentially of, or consists of APLP2 and HLA-A. In some embodiments, a receptor comprises, consists essentially of, or consists of PKP4 and HLA-A. In some embodiments, a receptor comprises, consists essentially of, or consists of ITGB5 and ITGA2B, e.g., Integrin αVβ5.

[0056] In some embodiments, a receptor comprises, consists essentially of, or consists of three proteins or subunits disclosed herein, or three receptors, proteins, or subunits contribute to uptake, for example for example, three of APLP2, PKP4, HLA-A, CD41, CD97, ITGB5, ITGA2B, Integrin αVβ5, PI4K2A, TMEM120A, PTK7A, Ceruloplasmin, PTPRF, SLC16A1, SLC7A5, ATP1B1, ATP2B4, P142A, and PIP4K2A.

[0057] In some embodiments, a receptor comprises, consists essentially of, or consists of four proteins or subunits disclosed herein, or four receptors, proteins, or subunits contribute to uptake, for example, for example, four of APLP2, PKP4, HLA-A, CD41, CD97, ITGB5, ITGA2B, Integrin αVβ5, PI4K2A, TMEM120A, PTK7A, Ceruloplasmin, PTPRF, SLC16A1, SLC7A5, ATP1B1, ATP2B4, P142A, and PIP4K2A.

[0058] In some embodiments, a single protein or receptor disclosed herein mediates binding and/or internalization of a ctDNA, derivative thereof, synthetic delivery system, or polynucleotide disclosed herein, for example, APLP2, PKP4, HLA-A, CD41, CD97, ITGB5, ITGA2B, Integrin αVβ5, PI4K2A, TMEM120A, PTK7A, Ceruloplasmin, PTPRF, SLC16A1, SLC7A5, ATP1B1, ATP2B4, PIP4K2A, or P142A.

[0059] In some embodiments, APLP2 mediates binding and/or internalization of the ctDNA, derivative thereof, synthetic delivery system, or polynucleotide. In some embodiments, PKP4 mediates binding and/or internalization of the ctDNA, derivative thereof, synthetic delivery system, or polynucleotide. In some embodiments, HLA-A mediates binding and/or internalization of the ctDNA, derivative thereof, synthetic delivery system, or polynucleotide. In some embodiments, APLP2 mediates binding and/or internalization of the ctDNA, derivative thereof, synthetic delivery system, or polynucleotide. In some embodiments, PKP4 mediates binding and/or internalization of the ctDNA, derivative thereof, synthetic delivery system, or polynucleotide. In some embodiments, HLA-A mediates binding and/or internalization of the ctDNA, derivative thereof, synthetic delivery system, or polynucleotide. In some embodiments, CD41 mediates binding and/or internalization of the ctDNA, derivative thereof, synthetic delivery system, or polynucleotide. In some embodiments, CD97 mediates binding and/or internalization of the ctDNA, derivative thereof, synthetic delivery system, or polynucleotide. In some embodiments, Integrin αVβ5 mediates binding and/or internalization of the ctDNA, derivative thereof, synthetic delivery system, or polynucleotide. In some embodiments, PI4K2A mediates binding and/or internalization of the ctDNA, derivative thereof, synthetic delivery system, or polynucleotide. In some embodiments, TMEM120A mediates binding and/or internalization of the ctDNA, derivative thereof, synthetic delivery system, or polynucleotide. In some embodiments, PTK7A mediates binding and/or internalization of the ctDNA, derivative thereof, synthetic delivery system, or polynucleotide. In some embodiments, Ceruloplasmin mediates binding and/or internalization of the ctDNA, derivative thereof, synthetic delivery system, or polynucleotide. In some embodiments, PTPRF mediates binding and/or internalization of the ctDNA, derivative thereof, synthetic delivery system, or polynucleotide. In some embodiments, SLC16A1 mediates binding and/or internalization of the ctDNA, derivative thereof, synthetic delivery system, or polynucleotide. In some embodiments, SLC7A5 mediates binding and/or internalization of the ctDNA, derivative thereof, synthetic delivery system, or polynucleotide. In some embodiments, ATP1B1 mediates binding and/or internalization of the ctDNA, derivative thereof, synthetic delivery system, or polynucleotide. In some embodiments, ATP2B4 mediates binding and/or internalization of the ctDNA, derivative thereof, synthetic delivery system, or polynucleotide. In some embodiments, PIP4K2A mediates binding and/or internalization of the ctDNA, derivative thereof, synthetic delivery system, or polynucleotide. In some embodiments, P142A mediates binding and/or internalization of the ctDNA, derivative thereof, synthetic delivery system, or polynucleotide.

[0060] In some embodiments, one or more proteins, subunits, or receptors disclosed herein mediate binding and/or internalization of a ctDNA, derivative thereof, synthetic delivery system, or polynucleotide disclosed herein, for example, one or more of APLP2, PKP4, HLA-A, CD41, CD97, ITGB5, ITGA2B, Integrin αVβ5, PI4K2A, TMEM120A, PTK7A, Ceruloplasmin, PTPRF, SLC16A1, SLC7A5, ATP1B1, ATP2B4, PIP4K2A, and P142A.

[0061] In some embodiments, APLP2 and one or more additional proteins mediate binding and/or internalization of the ctDNA, derivative thereof, synthetic delivery system, or polynucleotide. In some embodiments, PKP4 and one or more additional proteins mediate binding and/or internalization of the ctDNA, derivative thereof, synthetic delivery system, or polynucleotide. In some embodiments, HLA-A and one or more additional proteins mediate binding and/or internalization of the ctDNA, derivative thereof, synthetic delivery system, or polynucleotide. In some embodiments, CD41 and one or more additional proteins mediate binding and/or internalization of the ctDNA, derivative thereof, synthetic delivery system, or polynucleotide. In some embodiments, CD97 and one or more additional proteins mediate binding and/or internalization of the ctDNA, derivative thereof, synthetic delivery system, or polynucleotide. In some embodiments, Integrin αVβ5 and one or more additional proteins mediate binding and/or internalization of the ctDNA, derivative thereof, synthetic delivery system, or polynucleotide. In some embodiments, PI4K2A and one or more additional proteins mediate binding and/or internalization of the ctDNA, derivative thereof, synthetic delivery system, or polynucleotide. In some embodiments, TMEM120A and one or more additional proteins mediate binding and/or internalization of the ctDNA, derivative thereof, synthetic delivery system, or polynucleotide. In some embodiments, PTK7A and one or more additional proteins mediate binding and/or internalization of the ctDNA, derivative thereof, synthetic delivery system, or polynucleotide. In some embodiments, Ceruloplasmin and one or more additional proteins mediate binding and/or internalization of the ctDNA, derivative thereof, synthetic delivery system, or polynucleotide. In some embodiments, PTPRF and one or more additional proteins mediate binding and/or internalization of the ctDNA, derivative thereof, synthetic delivery system, or polynucleotide. In some embodiments, SLC16A1 and one or more additional proteins mediate binding and/or internalization of the ctDNA, derivative thereof, synthetic delivery system, or polynucleotide. In some embodiments, SLC7A5 and one or more additional proteins mediate binding and/or internalization of the ctDNA, derivative thereof, synthetic delivery system, or polynucleotide. In some embodiments, ATP1B1 and one or more additional proteins mediate binding and/or internalization of the ctDNA, derivative thereof, synthetic delivery system, or polynucleotide. In some embodiments, ATP2B4 and one or more additional proteins mediate binding and/or internalization of the ctDNA, derivative thereof, synthetic delivery system, or polynucleotide. In some embodiments, PIP4K2A and one or more additional proteins mediate binding and/or internalization of the ctDNA, derivative thereof, synthetic delivery system, or polynucleotide. In some embodiments, P142A and one or more additional proteins mediate binding and/or internalization of the ctDNA, derivative thereof, synthetic delivery system, or polynucleotide.

[0062] In some embodiments, two proteins, receptors, or subunits disclosed herein mediate binding and/or internalization of a ctDNA, derivative thereof, synthetic delivery system, or polynucleotide disclosed herein, for example, two of APLP2, PKP4, HLA-A, CD41, CD97, ITGB5, ITGA2B, Integrin αVβ5, PI4K2A, TMEM120A, PTK7A, Ceruloplasmin, PTPRF, SLC16A1, SLC7A5, ATP1B1, ATP2B4, PIP4K2A, and P142A. In some embodiments APLP2 and PKP4 mediate binding and/or internalization of the ctDNA, derivative thereof, synthetic delivery system, or polynucleotide. In some embodiments, APLP2 and HLA-A mediate binding and/or internalization of the ctDNA, derivative thereof, synthetic delivery system, or polynucleotide. In some embodiments, PKP4 and HLA-A mediate binding and/or internalization of the ctDNA, derivative thereof, synthetic delivery system, or polynucleotide.

[0063] In some embodiments, two or more proteins, receptors, or subunits disclosed herein mediate binding and/or internalization of a ctDNA, derivative thereof, synthetic delivery system, or polynucleotide disclosed herein, for example, two or more of APLP2, PKP4, HLA-A, CD41, CD97, ITGB5, ITGA2B, Integrin αVβ5, PI4K2A, TMEM120A, PTK7A, Ceruloplasmin, PTPRF, SLC16A1, SLC7A5, ATP1B1, ATP2B4, PIP4K2A, and P142A. In some embodiments, APLP2, PKP4, and one or more additional proteins mediate binding and/or internalization of the ctDNA, derivative thereof, synthetic delivery system, or polynucleotide. In some embodiments, APLP2, HLA-A, and one or more additional proteins mediate binding and/or internalization of the ctDNA, derivative thereof, synthetic delivery system, or polynucleotide. In some embodiments, PKP4, HLA-A, and one or more additional proteins mediate binding and/or internalization of the ctDNA, derivative thereof, synthetic delivery system, or polynucleotide.

[0064] In some embodiments, three proteins, receptors, or subunits disclosed herein mediate binding and/or internalization of a ctDNA, derivative thereof, synthetic delivery system, or polynucleotide disclosed herein, for example, three of APLP2, PKP4, HLA-A, CD41, CD97, ITGB5, ITGA2B, Integrin αVβ5, PI4K2A, TMEM120A, PTK7A, Ceruloplasmin, PTPRF, SLC16A1, SLC7A5, ATP1B1, ATP2B4, PIP4K2A, and P142A. In some embodiments, APLP2, PKP4, and HLA-A mediate binding and/or internalization of the ctDNA, derivative thereof, synthetic delivery system, or polynucleotide.

[0065] In some embodiments, three or more proteins, receptors, or subunits disclosed herein mediate binding and/or internalization of a ctDNA, derivative thereof, synthetic delivery system, or polynucleotide disclosed herein, for example, three or more of APLP2, PKP4, HLA-A, CD41, CD97, ITGB5, ITGA2B, Integrin αVβ5, PI4K2A, TMEM120A, PTK7A, Ceruloplasmin, PTPRF, SLC16A1, SLC7A5, ATP1B1, ATP2B4, PIP4K2A, and P142A. In some embodiments, APLP2, PKP4, and HLA-A, and one or more additional proteins mediate binding and/or internalization of the ctDNA, derivative thereof, synthetic delivery system, or polynucleotide.

### Target Cells

[0066] Compositions and methods disclosed herein can relate to target cells. For example, an antagonist disclosed herein can be used to reduce uptake of ctDNA by target cells, a biological sample disclosed herein can comprise target cells and can be assayed to determine a level of expression of a receptor associated with uptake of ctDNA, a synthetic delivery system, polynucleotide, or cargo can be delivered to a target cell, or an assay can be performed on target cells to identify a receptor that mediates uptake of ctDNA.

[0067] Compositions and methods disclosed herein can comprise blocking binding or uptake of a ctDNA by a target cell. For example, a target cell can comprise a receptor, and the target cell, ctDNA, or receptor can be contacted with an antagonist disclosed herein, thereby reducing binding of the ctDNA to the target cell and/or reducing uptake of the ctDNA by the target cell.

[0068] Compositions and methods disclosed herein can comprise delivering a cargo to a target cell. For example, a target cell can comprise a receptor, and uptake of the synthetic delivery system or cargo by the target cell can be induced by contacting the target cell or the receptor on the target cell with a synthetic delivery system and/or polynucleotide disclosed herein. Methods disclosed herein can comprise identifying a receptor that mediates uptake of a cargo by a target cell.

[0069] A target cell can be a primary cell. A target cell can be a cancer cell, for example, a hematologic tumor cell or a solid tumor cell. A target cell can be a cell line.

[0070] A target cell can be a eukaryotic cell. A target cell can be a mammalian cell. A target cell can be a human cell.

[0071] A target cell can be a leukocyte, such as a lymphoid or myeloid cell. A target cell can be a plasma cell. A target cell can be a multiple myeloma cell. A target cell can be a B cell. A target cell can be a T cell. A target cell can be a lymphocyte. A target cell can be a monocyte or a macrophage. A target cell can be a neoplastic myeloid cell. A target cell can be a neoplastic lymphoid cell. A target cell can be a multiple myeloma cell. A target cell can be a leukemia cell. A target cell can be a lymphoma cell.

[0072] A target cell can be a pancreatic cell. A target cell can be an exocrine pancreatic cell. A target cell can be an endocrine pancreatic cell. A target cell can be a pancreatic cancer cell. A target cell can be a bile duct cell. A target cell can be a gallbladder cell.

[0073] A target cell can be a gastrointestinal cell. A target cell can be, for example, an intestine cell, such as a colon cell. A target cell can be a colorectal cancer cell.

[0074] A target cell can be, for example, a lymphoma, leukemia, lung cancer, colon cancer, or brain cancer cell.

[0075] In some embodiments, a ctDNA, synthetic delivery system, or polynucleotide disclosed herein or a component thereof (e.g., a recognition sequence) can specifically or preferentially mediate binding, uptake, and/or genomic integration of a target cell. For example, in some embodiments, a synthetic delivery system disclosed herein can bind to, enter, localize to the nucleus of, and/or integrate into the genome of a target cell disclosed herein at least 10%, at least 20%, at least 30%, at least 40%, at least 50%, at least 60%, at least 70%, at least 80%, at least 90%, at least 2-fold, at least 3 fold, at least 4 fold, at least 5 fold, at least 6 fold, at least 7 fold, at least 8 fold, at least 9 fold, at least 10 fold, at least 11 fold, at least 12 fold, at least 13 fold, at least 14, at least 15 fold, at least 20 fold, at least 30 fold, at least 40 fold, at least 50 fold, at least 60 fold, at least 70 fold, at least 80 fold, at least 90 fold, at least 100 fold, at least 150 fold, at least 200 fold, at least 250 fold, at least 300 fold, at least 350 fold, at least 400 fold, at least 500 fold, at least 600 fold, at least 700 fold, at least 800 fold, at least 900 fold, at least 1000 fold, at least 1500 fold, at least 2000 fold, or at least 3000 fold more than a control cell. The control cell can be, for example, a different cell or tissue type. The control cell can be, for example, a corresponding cell type that is a non-cancer cell, as compared to a target cell that is a cancer cell.

[0076] In some embodiments, specificity for a target cell can reduce off-target and unwanted side effects, for example, as compared to conventional cargo delivery system (e.g., nanoparticles or viral vectors).

### Synthetic Delivery System

[0077] Compositions and methods provided herein include synthetic delivery systems that utilize polynucleotides to facilitate binding, uptake, nuclear trafficking, and/or genomic integration of a component of the synthetic delivery system, for example, a cargo. The compositions and methods can be used for delivery of a cargo to cells, including specific cell types and cancer cells. Synthetic delivery systems disclosed herein can provide for cell-, tissue-, and/or organ-specific targeting, delivery, binding, uptake, nuclear localization and/or genomic integration, e.g., of a cargo.

[0078] A synthetic delivery system disclosed herein can comprise a polynucleotide. A synthetic delivery system can comprise, for example, a polynucleotide and a cargo. A polynucleotide can be or can comprise double stranded DNA (dsDNA). In some embodiments, a polynucleotide comprises single stranded DNA. In some embodiments, a polynucleotide comprises RNA.

[0079] A polynucleotide of the disclosure or a part thereof (for example, recognition and/or integration sequence) can be from or derived from a nucleic acid sequence of a biological sample (e.g., blood, plasma, or tissue sample of a subject, such as a human). A polynucleotide of the disclosure or a part thereof (for example, recognition and/or integration sequence) can be from or derived from a cancerous cell or tissue.

[0080] A polynucleotide in a synthetic delivery system or a part thereof (for example, recognition and/or integration sequence) can be from or derived from a circulating tumor DNA (ctDNA), for example, from a human. A ctDNA can comprise double stranded DNA (dsDNA). In some embodiments, a ctDNA comprises single stranded DNA. Such a ctDNA or a fragment thereof can comprise a nucleic acid sequence that can have the ability to target a certain cell or cell population, and induce binding, uptake, nuclear localization, and/or genomic integration of a polynucleotide or cargo disclosed herein.

[0081] A polynucleotide in a synthetic delivery system that delivers a cargo to a target cell can comprise a nucleic acid sequence that is from or derived from ctDNA. The ctDNA can originate from the same cell type or tissue type as the target cell. A polynucleotide used to deliver a cargo to a target cell can comprise a nucleic acid sequence that is from or derived from ctDNA of substantially the same cell type or substantially the same tissue type as the target cell. A polynucleotide used to deliver a cargo to a target cell can comprise a nucleic acid sequence that is from or derived ctDNA of a substantially similar cell type or substantially similar tissue type as the target cell. For example, a ctDNA from multiple myeloma or a component (e.g., subsequence or recognition sequence) therefrom can be used to generate a synthetic delivery system for delivery, binding, uptake, nuclear localization, and/or genomic integration of a cargo to a multiple myeloma target cell or a related target cell or target cell type. ctDNA from pancreatic cancer or a component (e.g., subsequence or recognition sequence) therefrom can be used to generate a synthetic delivery system for delivery, binding, uptake, nuclear localization, and/or genomic integration of a cargo to a pancreatic cancer target cell or a related target cell or target cell type. ctDNA from colorectal cancer or a component (e.g., subsequence or recognition sequence) therefrom can be used to generate a synthetic delivery system for delivery, binding, uptake, nuclear localization, and/or genomic integration of a cargo to a colorectal cancer target cell or a related target cell or target cell type. ctDNA from lung cancer or a component (e.g., subsequence or recognition sequence) therefrom can be used to generate a synthetic delivery system for delivery, binding, uptake, nuclear localization, and/or genomic integration of a cargo to a lung cancer target cell or a related target cell or target cell type.

[0082] A ctDNA, synthetic delivery system, or polynucleotide can comprise a recognition sequence that can provide for cell-specific targeting and/or uptake of the ctDNA, polynucleotide, synthetic delivery system, or cargo. In some embodiments, the recognition sequence binds to a receptor that mediates or is associated with uptake of ctDNA. In some embodiments, the recognition sequence of a ctDNA, synthetic delivery system, or polynucleotide specifically or preferentially binds to a receptor that is associated with uptake of ctDNA. In some embodiments, the recognition sequence results in preferential binding of a ctDNA, synthetic delivery system, polynucleotide, or cargo to a target cell as compared to a control cell. In some embodiments, the recognition sequence results in preferential uptake of a ctDNA, synthetic delivery system, polynucleotide, or cargo by a target cell as compared to a control cell. In some embodiments, the recognition sequence results in preferential binding, uptake, nuclear localization, and/or genomic integration of a ctDNA, synthetic delivery system, polynucleotide, or cargo by a target cell as compared to a control cell. The control cell can be, for example, a cell of a different cell type. In some embodiments, the target cell is a cancer cell and the control cell is a non-cancer cell. In some embodiments, the target cell is a cancer cell of a first cell type and the control cell is a cancer cell of a second cell type. In some embodiments, the target cell is a cancer cell of a first cell type and the control cell is a non-cancer cell of a second cell type.

[0083] In some embodiments, the recognition sequence of a ctDNA, synthetic delivery system, or polynucleotide facilitates at least 10%, at least 20%, at least 30%, at least 40%, at least 50%, at least 60%, at least 70%, at least 80%, at least 90%, at least 2-fold, at least 3 fold, at least 4 fold, at least 5 fold, at least 6 fold, at least 7 fold, at least 8 fold, at least 9 fold, at least 10 fold, at least 11 fold, at least 12 fold, at least 13 fold, at least 14, at least 15 fold, at least 20 fold, at least 30 fold, at least 40 fold, at least 50 fold, at least 60 fold, at least 70 fold, at least 80 fold, at least 90 fold, at least 100 fold, at least 150 fold, at least 200 fold, at least 250 fold, at least 300 fold, at least 350 fold, at least 400 fold, at least 500 fold, at least 600 fold, at least 700 fold, at least 800 fold, at least 900 fold, at least 1000 fold, at least 1500 fold, at least 2000 fold, or at least 3000 fold higher binding to a receptor disclosed herein or to a target cell (e.g., population thereof) disclosed herein as compared to a control ctDNA, synthetic delivery system, or polynucleotide that lacks the recognition sequence.

[0084] In some embodiments, the recognition sequence of a ctDNA, synthetic delivery system, or polynucleotide facilitates at least 10%, at least 20%, at least 30%, at least 40%, at least 50%, at least 60%, at least 70%, at least 80%, at least 90%, at least 2-fold, at least 3 fold, at least 4 fold, at least 5 fold, at least 6 fold, at least 7 fold, at least 8 fold, at least 9 fold, at least 10 fold, at least 11 fold, at least 12 fold, at least 13 fold, at least 14, at least 15 fold, at least 20 fold, at least 30 fold, at least 40 fold, at least 50 fold, at least 60 fold, at least 70 fold, at least 80 fold, at least 90 fold, at least 100 fold, at least 150 fold, at least 200 fold, at least 250 fold, at least 300 fold, at least 350 fold, at least 400 fold, at least 500 fold, at least 600 fold, at least 700 fold, at least 800 fold, at least 900 fold, at least 1000 fold, at least 1500 fold, at least 2000 fold, or at least 3000 fold higher uptake of the ctDNA, synthetic delivery system, polynucleotide, or cargo by target cells as compared to a control ctDNA, synthetic delivery system, or polynucleotide that lacks the recognition sequence.

[0085] In some embodiments, the recognition sequence of a ctDNA, synthetic delivery system, or polynucleotide facilitates at least 10%, at least 20%, at least 30%, at least 40%, at least 50%, at least 60%, at least 70%, at least 80%, at least 90%, at least 2-fold, at least 3 fold, at least 4 fold, at least 5 fold, at least 6 fold, at least 7 fold, at least 8 fold, at least 9 fold, at least 10 fold, at least 11 fold, at least 12 fold, at least 13 fold, at least 14, at least 15 fold, at least 20 fold, at least 30 fold, at least 40 fold, at least 50 fold, at least 60 fold, at least 70 fold, at least 80 fold, at least 90 fold, at least 100 fold, at least 150 fold, at least 200 fold, at least 250 fold, at least 300 fold, at least 350 fold, at least 400 fold, at least 500 fold, at least 600 fold, at least 700 fold, at least 800 fold, at least 900 fold, at least 1000 fold, at least 1500 fold, at least 2000 fold, or at least 3000 fold higher nuclear localization of the ctDNA, synthetic delivery system, polynucleotide, or cargo in target cells as compared to a control ctDNA, synthetic delivery system, or polynucleotide that lacks the recognition sequence.

[0086] In some embodiments, the recognition sequence of a ctDNA, synthetic delivery system, or polynucleotide facilitates at least 10%, at least 20%, at least 30%, at least 40%, at least 50%, at least 60%, at least 70%, at least 80%, at least 90%, at least 2-fold, at least 3 fold, at least 4 fold, at least 5 fold, at least 6 fold, at least 7 fold, at least 8 fold, at least 9 fold, at least 10 fold, at least 11 fold, at least 12 fold, at least 13 fold, at least 14, at least 15 fold, at least 20 fold, at least 30 fold, at least 40 fold, at least 50 fold, at least 60 fold, at least 70 fold, at least 80 fold, at least 90 fold, at least 100 fold, at least 150 fold, at least 200 fold, at least 250 fold, at least 300 fold, at least 350 fold, at least 400 fold, at least 500 fold, at least 600 fold, at least 700 fold, at least 800 fold, at least 900 fold, at least 1000 fold, at least 1500 fold, at least 2000 fold, or at least 3000 fold higher genomic integration of the ctDNA, synthetic delivery system, polynucleotide, or cargo by target cells as compared to a control ctDNA, synthetic delivery system, or polynucleotide that lacks the recognition sequence.

[0087] In an example, a multiple myeloma (MM)-derived recognition sequence can target binding and/or uptake of a synthetic delivery system, polynucleotide, and/or cargo by MM cells but not, e.g. pancreatic cells. A pancreatic cancer (PC)-derived recognition sequence can target binding and/or uptake of a synthetic delivery system, polynucleotide, and/or cargo by pancreatic cancer cells, but not, e.g., multiple myeloma cells.

[0088] A recognition sequence can be derived from a ctDNA. For example, a recognition sequence can be a fragment of a ctDNA identified by sequencing a ctDNA from a subject, e.g., from plasma of a human subject with a cancer. A recognition can be derived from a ctDNA that originates from a lymphoma, leukemia, lung cancer, colon cancer (e.g., colorectal cancer), brain cancer, multiple myeloma, pancreatic cancer, hematologic cancer, or solid cancer.

[0089] A synthetic delivery system or polynucleotide can comprise any suitable number of recognition sequences, for example, one, two, three, four, or five recognition sequences. In some embodiments, a synthetic delivery system or polynucleotide comprises one recognition sequence. In some embodiments, a synthetic delivery system or polynucleotide comprises two recognition sequences, for example, a first recognition sequence at a 5′ region of the polynucleotide and a second recognition sequence at a 3′ region of the polynucleotide, optionally separated by a non-recognition sequence or component, such as a nucleic acid cargo.

[0090] In some embodiments, a synthetic delivery system or polynucleotide can comprise at least two, at least three, at least four, at least five, or another suitable number of recognition sequences at either the 3′ or the 5′ end, or both, of a polynucleotide. A composition of the disclosure can comprise a plurality of such polynucleotides, and each polynucleotide can target one or more cell type(s). Accordingly, the methods and compositions of the present disclosure can be used to target one or more different target cells, one or more different target cell population(s), and/or one or more different target tissue(s), e.g., simultaneously.

[0091] A polynucleotide or a nucleic acid sequence (e.g., a recognition sequence, integration sequence, first nucleic acid sequence, or second nucleic acid sequence) can comprise a transposable element (TE) or a derivative thereof. A transposable element can comprise a transposon or a derivative thereof. A transposable element can comprise a retrotransposon or a derivative thereof. A transposable element or transposon can be any suitable class, subclass, family, subfamily, type, or the like, including those disclosed herein. A transposable element or transposon can be a variant or derivative of a transposable element of a given class, subclass, family, subfamily, or type, including those disclosed herein.

[0092] A transposable element or functional fragment thereof can be from or derived from, for example, a class I or class II transposon. In some embodiments, a transposable element comprises or is derived from a short interspersed nuclear elements (SINE), long interspersed nuclear elements (LINE), ERVL, or ERVK transposable element.

[0093] In some embodiments, a ctDNA, polynucleotide, or a nucleic acid sequence (e.g., a recognition sequence, integration sequence, first nucleic acid sequence, or second nucleic acid sequence) comprises a transposable element that is an AluSp, MER11C, AluY, 2L2a, ALluY, ALR/Alpha, ALU, AluJb, AluS1, AluSc8, AluSg, ALUSg2, AluSq, AluSq2, ALUSx, AluSx, AluSxl, AluSz, AluSz6, AluYc3, ASLUSq2, ERVK/LTR, ERVL, ERVL-MaLR, FLAM_C and AluY, HERV17-int, HERV9N-int, L1M1, L1MB3, L1ME4b, L1MEg, L1P1, L1P3, L1PA10, L1PA15, L1PA7, L1PB4, L2a, L2a/LTR40b/MLT1J2, LINE/L1, LINE/L2, LTR, LTR/ERV1, LTR/ERVL, LTR/ERVL-MaLR, LTR/Gypsy, LTR41C, LTR81B, Mam_R4, Mamr4, Many, MER11B, MER41E, MIR, MIRB, MIRc, MIRc-part L2, MLT1J2, MLT2B1, MTL1J2, MTL2B4, parAluSp-FULLMTL1J2, REP522, Satellite/centr, SINE/Alu, SINE/MIR, THE1A, THE1B, THE1C, or Tigger3a transposable element, or a derivative thereof.

[0094] In some embodiments, a ctDNA, polynucleotide, or a nucleic acid sequence (e.g., a recognition sequence, integration sequence, first nucleic acid sequence, or second nucleic acid sequence) comprises a transposable element that is an AluSp transposable element or a derivative thereof.

[0095] In some embodiments, a ctDNA, polynucleotide, or a nucleic acid sequence (e.g., a recognition sequence, integration sequence, first nucleic acid sequence, or second nucleic acid sequence) comprises a transposable element that is a MER11C transposable element or a derivative thereof.

[0096] In some embodiments, a ctDNA, polynucleotide, or a nucleic acid sequence (e.g., a recognition sequence, integration sequence, first nucleic acid sequence, or second nucleic acid sequence) comprises a transposable element that is a AluSx transposable element or a derivative thereof.

[0097] In some embodiments, a ctDNA, polynucleotide, or a nucleic acid sequence (e.g., a recognition sequence, integration sequence, first nucleic acid sequence, or second nucleic acid sequence) comprises a transposable element that is a MTL1J transposable element or a derivative thereof.

[0098] In some embodiments, a ctDNA, polynucleotide, or a nucleic acid sequence (e.g., a recognition sequence, integration sequence, first nucleic acid sequence, or second nucleic acid sequence) comprises a transposable element that is a AluSg2 transposable element or a derivative thereof.

[0099] In some embodiments, a ctDNA, polynucleotide, or a nucleic acid sequence (e.g., a recognition sequence, integration sequence, first nucleic acid sequence, or second nucleic acid sequence) comprises a transposable element that is a THE1A transposable element or a derivative thereof.

[0100] In some embodiments, a ctDNA, polynucleotide, or a nucleic acid sequence (e.g., a recognition sequence, integration sequence, first nucleic acid sequence, or second nucleic acid sequence) comprises a transposable element that is an AluJb transposable element or a derivative thereof.

[0101] In some embodiments, a ctDNA, polynucleotide, or a nucleic acid sequence (e.g., a recognition sequence, integration sequence, first nucleic acid sequence, or second nucleic acid sequence) comprises a transposable element that is a MTL2B4 transposable element or a derivative thereof.

[0102] In some embodiments, a ctDNA, polynucleotide, or a nucleic acid sequence (e.g., a recognition sequence, integration sequence, first nucleic acid sequence, or second nucleic acid sequence) comprises a transposable element that is a L2a transposable element or a derivative thereof.

[0103] In some embodiments, a ctDNA, polynucleotide, or a nucleic acid sequence (e.g., a recognition sequence, integration sequence, first nucleic acid sequence, or second nucleic acid sequence) comprises a transposable element that is a MTL1J2 transposable element or a derivative thereof.

[0104] In some embodiments, a ctDNA, polynucleotide, or a nucleic acid sequence (e.g., a recognition sequence, integration sequence, first nucleic acid sequence, or second nucleic acid sequence) comprises a transposable element that is an AluSq transposable element or a derivative thereof.

[0105] In some embodiments, a ctDNA, polynucleotide, or a nucleic acid sequence (e.g., a recognition sequence, integration sequence, first nucleic acid sequence, or second nucleic acid sequence) comprises a transposable element that is a L1MB3 transposable element or a derivative thereof.

[0106] In some embodiments, a ctDNA, polynucleotide, or a nucleic acid sequence (e.g., a recognition sequence, integration sequence, first nucleic acid sequence, or second nucleic acid sequence) comprises a transposable element that is a THE1C transposable element or a derivative thereof.

[0107] In some embodiments, a ctDNA, polynucleotide, or a nucleic acid sequence (e.g., a recognition sequence, integration sequence, first nucleic acid sequence, or second nucleic acid sequence) comprises a transposable element that is an AluY transposable element or a derivative thereof.

[0108] In some embodiments, upon contacting, arrival, or internalization at the host cell, a transposable element disclosed herein co-opts the cellular retrotransposition machinery to integrate into the target (e.g., cancer) cell genome. In some embodiments, tissue-specific delivery, uptake, and/or integration can be determined by the retrotransposon's sequence and the host's expression of the retrotransposition machinery.

[0109] A ctDNA or polynucleotide can comprise an integration sequence that facilitates integration of the ctDNA, polynucleotide, synthetic delivery system, or cargo, into the genome of a target cell. The integration sequence can comprise, for example, a transposon integration signal. In some embodiments, a polynucleotide lacks an integration sequence.

[0110] A polynucleotide can comprise a transposon sequence or a functional fragment thereof. A polynucleotide can comprise two or more transposon sequences or functional fragments thereof. A transposon sequence or functional fragment thereof can be from or derived from, for example, a class II transposon.

[0111] A polynucleotide can comprise a first nucleic acid sequence that is from or derived from ctDNA. The ctDNA can originate from a cancer cell of the same, substantially the same, or a substantially similar cell type or tissue type as a target cell.

[0112] The first nucleic acid sequence can be in a 3′ region of the polynucleotide. The polynucleotide can further comprise a second nucleic acid sequence, for example, that was identified in, is from, or is derived from ctDNA. The ctDNA can be from or derived from the same, substantially the same, or a substantially similar cell type or tissue type as the target cell. The ctDNA can be the same ctDNA as that from which the first nucleic acid sequence is from or derived from. In some embodiments, the ctDNA is different than the ctDNA from which the first nucleic acid sequence is from or derived from. The second nucleic acid can be in a 5′ region of the polynucleotide. The first nucleic acid sequence can be or can comprise a nucleic acid sequence with at least 70%, at least 80%, at least 90%, at least 95%, or at least 99% sequence identity to any one or more of SEQ ID NOs: 1-277 and SEQ ID NOs: 282-349, or a fragment thereof. The second nucleic acid sequence can be or can comprise a nucleic acid sequence with at least 70%, at least 80%, at least 90%, at least 95%, or at least 99% sequence identity to any one or more of SEQ ID NOs: 1-277 and SEQ ID NOs: 282-349, or a fragment thereof. The first and/or the second nucleic acid sequence can comprise a functional fragment (for example, a recognition sequence or integration sequence) that is from or derived from any one or more of SEQ ID NOs: 1-277 and SEQ ID NOs: 282-349.

[0113] The first nucleic acid sequence can be in a 5′ region of the polynucleotide. The polynucleotide can further comprise a second nucleic acid sequence, for example, that was identified in, is from, or is derived from ctDNA. The ctDNA can be from or derived from the same, substantially the same, or a substantially similar cell type or tissue type as the target cell. The ctDNA can be the same ctDNA as that from which the first nucleic acid sequence is from or derived from. In some embodiments, the ctDNA is different than the ctDNA from which the first nucleic acid sequence is from or derived from. The second nucleic acid can be in a 3′ region of the polynucleotide. The first and/or the second nucleic acid sequence can comprise a functional fragment (for example, a recognition sequence or integration sequence) that is from or derived from any suitable sequence disclosed herein. The first nucleic acid sequence can be or can comprise a nucleic acid sequence with at least 70%, at least 80%, at least 90%, at least 95%, or at least 99% sequence identity to any one or more of SEQ ID NOs: 1-277 and SEQ ID NOs: 282-349, or a fragment thereof. The second nucleic acid sequence can be or can comprise a nucleic acid sequence with at least 70%, at least 80%, at least 90%, at least 95%, or at least 99% sequence identity to any one or more of SEQ ID NOs: 1-277 and SEQ ID NOs: 282-349, or a fragment thereof. The first and/or the second nucleic acid sequence can comprise a functional fragment (for example, a recognition sequence or integration sequence) that is from or derived from any one or more of SEQ ID NOs: 1-277 and SEQ ID NOs: 282-349.

[0114] In some embodiments, one portion (e.g., about half) of a nucleic acid sequence can be linked to the 5′ end of a nucleic acid cargo, gene, or sequence of interest, and the other portion (e.g., about half) of the sequence can be linked 3′ end of the nucleic acid cargo, gene, or sequence of interest. In some embodiments, a nucleic acid sequence can be linked directly or indirectly to a nucleic acid cargo, gene, or sequence of interest. For example, a first sequence can be linked directly to the 5′ end of a nucleic acid sequence comprising the nucleic acid cargo, gene, or sequence of interest, and a second sequence can be linked indirectly to the 3′ end of the nucleic acid sequence comprising the nucleic acid cargo, gene, or sequence of interest. In some embodiments, a composition of the present disclosure can comprise a guide sequence that is directly linked to a nucleic acid cargo, gene, or sequence of interest at one terminus (e.g., 3′ end) and directly linked to a recognition sequence or integration sequence at the other terminus (e.g., 5′ end), thereby indirectly connecting the integration or insertion sequence and the nucleic acid cargo, gene, or sequence of interest.

[0115] In some embodiments, a ctDNA, synthetic delivery system, polynucleotide, or nucleic acid sequence comprises a disclosed minimal degree of sequence identity to a sequence disclosed herein, or a fragment thereof. The fragment thereof can be a functional fragment, for example, that act as a recognition sequence or integration sequence as disclosed herein.

[0116] In some embodiments, a polynucleotide or a nucleic acid sequence (for example, a ctDNA or a synthetic delivery system or a part thereof, such as a recognition sequence, integration sequence, first nucleic acid sequence, or second nucleic acid sequence) comprises, consists essentially of, or consists of a nucleic acid sequence with at least about 70%, at least about 75%, at least about 80%, at least about 81%, at least about 82%, at least about 83%, at least about 84%, at least about 85%, at least about 86%, at least about 87%, at least about 88%, at least about 89%, at least about 90%, at least about 91%, at least about 92%, at least about 93%, at least about 94%, at least about 95%, at least about 95.5%, at least about 96%, at least about 96.5%, at least about 97%, at least about 97.5%, at least about 98%, at least about 98.5%, at least about 99%, at least about 99.5%, or about 100% sequence identity to at least 10 consecutive nucleotides of any one of SEQ ID NOs: 1-277 and 282-349.

[0117] In some embodiments, a polynucleotide or a nucleic acid sequence (for example, a ctDNA or a synthetic delivery system or a part thereof, such as a recognition sequence, integration sequence, first nucleic acid sequence, or second nucleic acid sequence) comprises, consists essentially of, or consists of a nucleic acid sequence with at least about 70%, at least about 75%, at least about 80%, at least about 81%, at least about 82%, at least about 83%, at least about 84%, at least about 85%, at least about 86%, at least about 87%, at least about 88%, at least about 89%, at least about 90%, at least about 91%, at least about 92%, at least about 93%, at least about 94%, at least about 95%, at least about 95.5%, at least about 96%, at least about 96.5%, at least about 97%, at least about 97.5%, at least about 98%, at least about 98.5%, at least about 99%, at least about 99.5%, or about 100% sequence identity to at least 15 consecutive nucleotides of any one of SEQ ID NOs: 1-277 and 282-349.

[0118] In some embodiments, a polynucleotide or a nucleic acid sequence (for example, a ctDNA or a synthetic delivery system or a part thereof, such as a recognition sequence, integration sequence, first nucleic acid sequence, or second nucleic acid sequence) comprises, consists essentially of, or consists of a nucleic acid sequence with at least about 70%, at least about 75%, at least about 80%, at least about 81%, at least about 82%, at least about 83%, at least about 84%, at least about 85%, at least about 86%, at least about 87%, at least about 88%, at least about 89%, at least about 90%, at least about 91%, at least about 92%, at least about 93%, at least about 94%, at least about 95%, at least about 95.5%, at least about 96%, at least about 96.5%, at least about 97%, at least about 97.5%, at least about 98%, at least about 98.5%, at least about 99%, at least about 99.5%, or about 100% sequence identity to at least 20 consecutive nucleotides of any one of SEQ ID NOs: 1-277 and 282-349.

[0119] In some embodiments, a polynucleotide or a nucleic acid sequence (for example, a ctDNA or a synthetic delivery system or a part thereof, such as a recognition sequence, integration sequence, first nucleic acid sequence, or second nucleic acid sequence) comprises, consists essentially of, or consists of a nucleic acid sequence with at least about 70%, at least about 75%, at least about 80%, at least about 81%, at least about 82%, at least about 83%, at least about 84%, at least about 85%, at least about 86%, at least about 87%, at least about 88%, at least about 89%, at least about 90%, at least about 91%, at least about 92%, at least about 93%, at least about 94%, at least about 95%, at least about 95.5%, at least about 96%, at least about 96.5%, at least about 97%, at least about 97.5%, at least about 98%, at least about 98.5%, at least about 99%, at least about 99.5%, or about 100% sequence identity to at least 30 consecutive nucleotides of any one of SEQ ID NOs: 1-277 and 282-349.

[0120] In some embodiments, a polynucleotide or a nucleic acid sequence (for example, a ctDNA or a synthetic delivery system or a part thereof, such as a recognition sequence, integration sequence, first nucleic acid sequence, or second nucleic acid sequence) comprises, consists essentially of, or consists of a nucleic acid sequence with at least about 70%, at least about 75%, at least about 80%, at least about 81%, at least about 82%, at least about 83%, at least about 84%, at least about 85%, at least about 86%, at least about 87%, at least about 88%, at least about 89%, at least about 90%, at least about 91%, at least about 92%, at least about 93%, at least about 94%, at least about 95%, at least about 95.5%, at least about 96%, at least about 96.5%, at least about 97%, at least about 97.5%, at least about 98%, at least about 98.5%, at least about 99%, at least about 99.5%, or about 100% sequence identity to at least 50 consecutive nucleotides of any one of SEQ ID NOs: 1-277 and 282-349.

[0121] In some embodiments, a polynucleotide or a nucleic acid sequence (for example, a ctDNA or a synthetic delivery system or a part thereof, such as a recognition sequence, integration sequence, first nucleic acid sequence, or second nucleic acid sequence) comprises, consists essentially of, or consists of a nucleic acid sequence with at least about 70%, at least about 75%, at least about 80%, at least about 81%, at least about 82%, at least about 83%, at least about 84%, at least about 85%, at least about 86%, at least about 87%, at least about 88%, at least about 89%, at least about 90%, at least about 91%, at least about 92%, at least about 93%, at least about 94%, at least about 95%, at least about 95.5%, at least about 96%, at least about 96.5%, at least about 97%, at least about 97.5%, at least about 98%, at least about 98.5%, at least about 99%, at least about 99.5%, or about 100% sequence identity to at least 75 consecutive nucleotides of any one of SEQ ID NOs: 1-277 and 282-349.

[0122] In some embodiments, a polynucleotide or a nucleic acid sequence (for example, a ctDNA or a synthetic delivery system or a part thereof, such as a recognition sequence, integration sequence, first nucleic acid sequence, or second nucleic acid sequence) comprises, consists essentially of, or consists of a nucleic acid sequence with at least about 70%, at least about 75%, at least about 80%, at least about 81%, at least about 82%, at least about 83%, at least about 84%, at least about 85%, at least about 86%, at least about 87%, at least about 88%, at least about 89%, at least about 90%, at least about 91%, at least about 92%, at least about 93%, at least about 94%, at least about 95%, at least about 95.5%, at least about 96%, at least about 96.5%, at least about 97%, at least about 97.5%, at least about 98%, at least about 98.5%, at least about 99%, at least about 99.5%, or about 100% sequence identity to at least 100 consecutive nucleotides of any one of SEQ ID NOs: 1-277 and 282-349.

[0123] In some embodiments, a polynucleotide or a nucleic acid sequence (for example, a ctDNA or a synthetic delivery system or a part thereof, such as a recognition sequence, integration sequence, first nucleic acid sequence, or second nucleic acid sequence) comprises, consists essentially of, or consists of a nucleic acid sequence with at least about 70%, at least about 75%, at least about 80%, at least about 81%, at least about 82%, at least about 83%, at least about 84%, at least about 85%, at least about 86%, at least about 87%, at least about 88%, at least about 89%, at least about 90%, at least about 91%, at least about 92%, at least about 93%, at least about 94%, at least about 95%, at least about 95.5%, at least about 96%, at least about 96.5%, at least about 97%, at least about 97.5%, at least about 98%, at least about 98.5%, at least about 99%, at least about 99.5%, or about 100% sequence identity to at least 200 consecutive nucleotides of any one of SEQ ID NOs: 1-277 and 282-349.

[0124] In some embodiments, a polynucleotide or a nucleic acid sequence (for example, a ctDNA or a synthetic delivery system or a part thereof, such as a recognition sequence, integration sequence, first nucleic acid sequence, or second nucleic acid sequence) comprises, consists essentially of, or consists of a nucleic acid sequence with at least about 70%, at least about 75%, at least about 80%, at least about 81%, at least about 82%, at least about 83%, at least about 84%, at least about 85%, at least about 86%, at least about 87%, at least about 88%, at least about 89%, at least about 90%, at least about 91%, at least about 92%, at least about 93%, at least about 94%, at least about 95%, at least about 95.5%, at least about 96%, at least about 96.5%, at least about 97%, at least about 97.5%, at least about 98%, at least about 98.5%, at least about 99%, at least about 99.5%, or about 100% sequence identity to at least 300 consecutive nucleotides of any one of SEQ ID NOs: 1-277 and 282-349.

[0125] In some embodiments, a polynucleotide or a nucleic acid sequence (for example, a ctDNA or a synthetic delivery system or a part thereof, such as a recognition sequence, integration sequence, first nucleic acid sequence, or second nucleic acid sequence) comprises, consists essentially of, or consists of a nucleic acid sequence with at least about 70%, at least about 75%, at least about 80%, at least about 81%, at least about 82%, at least about 83%, at least about 84%, at least about 85%, at least about 86%, at least about 87%, at least about 88%, at least about 89%, at least about 90%, at least about 91%, at least about 92%, at least about 93%, at least about 94%, at least about 95%, at least about 95.5%, at least about 96%, at least about 96.5%, at least about 97%, at least about 97.5%, at least about 98%, at least about 98.5%, at least about 99%, at least about 99.5%, or about 100% sequence identity to any one of SEQ ID NOs: 1-277 and 282-349.

[0126] In some embodiments, a polynucleotide or a nucleic acid sequence (for example, a ctDNA or a synthetic delivery system or a part thereof, such as a recognition sequence, integration sequence, first nucleic acid sequence, or second nucleic acid sequence) comprises, consists essentially of, or consists of the nucleotide sequence of any one of SEQ ID NOs: 1-277 and 282-349.

[0127] In some embodiments, a polynucleotide or a nucleic acid sequence (for example, a ctDNA or a synthetic delivery system or a part thereof, such as a recognition sequence, integration sequence, first nucleic acid sequence, or second nucleic acid sequence) comprises, consists essentially of, or consists of a nucleic acid sequence with at most about 70%, at most about 75%, at most about 80%, at most about 85%, at most about 90%, at most about 95%, at most about 97.5. or at most about 99% sequence identity to any one of SEQ ID NOs: 1-277 and 282-349.

[0128] In some embodiments, a polynucleotide or a nucleic acid sequence (for example, a ctDNA or a synthetic delivery system or a part thereof, such as a recognition sequence, integration sequence, first nucleic acid sequence, or second nucleic acid sequence) comprises a nucleic acid sequence with one or more nucleotide insertions, deletions, or substitutions compared to any one of SEQ ID NOs: 1-277 and 282-349.

[0129] For example, the polynucleotide or a nucleic acid sequence can comprise at least 1, at least 2, at least 3, at least 4, at least 5, at least 6, at least 7, at least 8, at least 9, at least 10, at least 11, at least 12, at least 13, at least 14, at least 15, at least 16, at least 17, at least 18, at least 19, at least 20, at least 25, at least 30, at least 35, at least 40, at least 45, or at least 50 nucleotide insertions relative to any one of SEQ ID NOs: 1-277 and 282-349.

[0130] In some embodiments, the polynucleotide or a nucleic acid sequence comprises at most 1, at most 2, at most 3, at most 4, at most 5, at most 6, at most 7, at most 8, at most 9, at most 10, at most 11, at most 12, at most 13, at most 14, at most 15, at most 16, at most 17, at most 18, at most 19, at most 20, at most 25, at most 30, at most 35, at most 40, at most 45, or at most 50 nucleotide insertions relative to any one of SEQ ID NOs: 1-277 and 282-349.

[0131] In some embodiments, the polynucleotide or a nucleic acid sequence comprises 1, 2, 3, 4, 5, 6, 7, 8, 9, 10, 11, 12, 13, 14, 15, 16, 17, 18, 19, 20, 25, 30, 35, 40, 45, or 50 nucleotide insertions relative to any one of SEQ ID NOs: 1-277 and 282-349.

[0132] The one or more insertions can be at the 5′ end, 3′ end, within the sequence, or a combination thereof. The one or more insertions can be contiguous, non-contiguous, or a combination thereof.

[0133] In some embodiments, the polynucleotide or a nucleic acid sequence comprises at least 1, at least 2, at least 3, at least 4, at least 5, at least 6, at least 7, at least 8, at least 9, at least 10, at least 11, at least 12, at least 13, at least 14, at least 15, at least 16, at least 17, at least 18, at least 19, at least 20, at least 25, at least 30, at least 35, at least 40, at least 45, at least 50, at least 75, at least 100, at least 125, at least 150, at least 175, at least 200, at least 250, at least 300, at least 400, at least 500, at least 600, or at least 700 nucleotide deletions relative to any one of SEQ ID NOs: 1-277 and 282-349.

[0134] In some embodiments, the polynucleotide or a nucleic acid sequence comprises at most 1, at most 2, at most 3, at most 4, at most 5, at most 6, at most 7, at most 8, at most 9, at most 10, at most 11, at most 12, at most 13, at most 14, at most 15, at most 16, at most 17, at most 18, at most 19, at most 20, at most 25, at most 30, at most 35, at most 40, at most 45, or most 50, at most 75, at most 100, at most 125, at most 150, at most 175, at most 200, at most 250, at most 300, at most 400, at most 500, at most 600, or at most 700 nucleotide deletions relative to any one of SEQ ID NOs: 1-277 and 282-349.

[0135] In some embodiments, the polynucleotide or a nucleic acid sequence comprises 1, 2, 3, 4, 5, 6, 7, 8, 9, 10, 11, 12, 13, 14, 15, 16, 17, 18, 19, 20, 25, 30, 35, 40, 45, or50 nucleotide deletions relative to any one of SEQ ID NOs: 1-277 and 282-349.

[0136] The one or more deletions can be at the 5′ end, 3′ end, within the sequence, or a combination thereof. The one or more deletions can be contiguous, non-contiguous, or a combination thereof.

[0137] In some embodiments, the polynucleotide or a nucleic acid sequence comprises at least 1, at least 2, at least 3, at least 4, at least 5, at least 6, at least 7, at least 8, at least 9, at least 10, at least 11, at least 12, at least 13, at least 14, at least 15, at least 16, at least 17, at least 18, at least 19, at least 20, at least 25, at least 30, at least 35, at least 40, at least 45, or at least 50 nucleotide substitutions relative to any one of SEQ ID NOs: 1-277 and 282-349.

[0138] In some embodiments, the polynucleotide or a nucleic acid sequence comprises at most 1, at most 2, at most 3, at most 4, at most 5, at most 6, at most 7, at most 8, at most 9, at most 10, at most 11, at most 12, at most 13, at most 14, at most 15, at most 16, at most 17, at most 18, at most 19, at most 20, at most 25, at most 30, at most 35, at most 40, at most 45, or at most 50 nucleotide substitutions relative to any one of SEQ ID NOs: 1-277 and 282-349.

[0139] In some embodiments, the polynucleotide or a nucleic acid sequence comprises 1, 2, 3, 4, 5, 6, 7, 8, 9, 10, 11, 12, 13, 14, 15, 16, 17, 18, 19, 20, 25, 30, 35, 40, 45, or50 nucleotide substitutions relative to any one of SEQ ID NOs: 1-277 and 282-349.

[0140] The one or more substitutions can be at the 5′ end, 3′ end, within the sequence, or a combination thereof. The one or more substitutions can be contiguous, non-contiguous, or a combination thereof.

[0141] A polynucleotide or a nucleic acid sequence disclosed herein can be from about 50 base pairs (bp) to about 1000 bp in length. A polynucleotide or a nucleic acid sequence disclosed herein can be from about 100 base pairs (bp) to about 900 bp in length. A polynucleotide or a nucleic acid sequence disclosed herein can be from about 200 bp to about 800 bp in length. A polynucleotide or a nucleic acid sequence disclosed herein can be from about 300 bp to about 700 bp in length. A polynucleotide or a nucleic acid sequence disclosed herein can be from about 400 bp to about 600 bp in length. A polynucleotide or a nucleic acid sequence disclosed herein can be at least about 50 bp in length. A polynucleotide or a nucleic acid sequence disclosed herein can be at least about 100 bp in length. A polynucleotide or a nucleic acid sequence disclosed herein can be at least about 200 bp in length. A polynucleotide or a nucleic acid sequence disclosed herein can be at least about 300 bp in length. A polynucleotide or a nucleic acid sequence disclosed herein can be at least about 400 bp in length. A polynucleotide or a nucleic acid sequence disclosed herein can be at least about 500 bp in length. A polynucleotide or a nucleic acid sequence disclosed herein can be at least about 1000 bp in length.

[0142] A polynucleotide or a nucleic acid sequence disclosed herein can be at most about 50 bp in length. A polynucleotide or a nucleic acid sequence disclosed herein can be at most about 100 bp in length. A polynucleotide or a nucleic acid sequence disclosed herein can be at most about 200 bp in length. A polynucleotide or a nucleic acid sequence disclosed herein can be at most about 300 bp in length. A polynucleotide or a nucleic acid sequence disclosed herein can be at most about 400 bp in length. A polynucleotide or a nucleic acid sequence disclosed herein can be at most about 500 bp in length. A polynucleotide or a nucleic acid sequence disclosed herein can be at most about 1000 bp in length. A polynucleotide or a nucleic acid sequence disclosed herein can be at most about 5000 bp in length. A polynucleotide or a nucleic acid sequence disclosed herein can be at most about 10000 bp in length.

[0143] In some embodiments, the polynucleotide or a nucleic acid sequence disclosed herein (e.g., recognition sequence, integration sequence, first nucleic acid sequence, or second nucleic acid sequence) is at least 10 base pairs in length. In some embodiments, the polynucleotide or a nucleic acid sequence disclosed herein is at least 20 base pairs in length. In some embodiments, the polynucleotide or a nucleic acid sequence disclosed herein is at least 50 base pairs in length. In some embodiments, the polynucleotide or a nucleic acid sequence disclosed herein is at least 100 base pairs in length. In some embodiments, the polynucleotide or a nucleic acid sequence disclosed herein is at least 200 base pairs in length. In some cases, the polynucleotide or a nucleic acid sequence disclosed herein can be at least 400 base pairs in length.

[0144] In some embodiments, the polynucleotide or a nucleic acid sequence disclosed herein (e.g., recognition sequence, integration sequence, first nucleic acid sequence, or second nucleic acid sequence) is from about 10 base pairs to about 100 base pairs in length. In some embodiments, the polynucleotide or a nucleic acid sequence disclosed herein can be from about 10 base pairs to about 200 base pairs in length. In some embodiments, the polynucleotide or a nucleic acid sequence disclosed herein can be from about 20 base pairs to about 100 base pairs in length. In some embodiments, the polynucleotide or a nucleic acid sequence disclosed herein can be from about 100 base pairs to about 200 base pairs in length. In some embodiments, the polynucleotide or a nucleic acid sequence disclosed herein can be from about 100 base pairs to about 500 base pairs in length. In some embodiments, the polynucleotide or a nucleic acid sequence disclosed herein can be from about 200 base pairs to about 800 base pairs in length. In some embodiments, the polynucleotide or a nucleic acid sequence disclosed herein can be from about 400 base pairs to about 2,000 base pairs in length. In some embodiments, the polynucleotide or a nucleic acid sequence disclosed herein can be from about 400 base pairs to about 5,000 base pairs in length. In some embodiments, the polynucleotide or a nucleic acid sequence disclosed herein can be from about 1,500 base pairs to about 7,200 base pairs in length. In some embodiments, the polynucleotide or a nucleic acid sequence disclosed herein can be from about 1,900 base pairs to about 5,800 base pairs in length. In some embodiments, the polynucleotide or a nucleic acid sequence disclosed herein can be from about 2,000 base pairs to about 10,000 base pairs in length. In some embodiments, the polynucleotide or a nucleic acid sequence disclosed herein can be from about 5,000 base pairs to about 15,000 base pairs in length. In some embodiments, the polynucleotide or a nucleic acid sequence disclosed herein can be from about 600 base pairs to about 16,900 base pairs in length. In some embodiments, the polynucleotide or a nucleic acid sequence disclosed herein can be from about 8,000 base pairs to about 18,000 base pairs in length. In some embodiments, the polynucleotide or a nucleic acid sequence disclosed herein can be from about 10,000 base pairs to about 20,000 base pairs in length. In some embodiments, the polynucleotide or a nucleic acid sequence disclosed herein can be from about 400 base pairs to about 20,000 base pairs in length.

[0145] In some embodiments, a ctDNA, polynucleotide, or synthetic delivery system comprises a nucleic acid sequence has at least 70%, at least 80%, at least 90%, at least 95%, or at least 99% sequence identity to any one or more of SEQ ID NOs: 1-277 or SEQ ID NOs: 282-349, or at least 70%, at least 80%, at least 90%, at least 95%, or at least 99% sequence identity to a fragment thereof.

[0146] A polynucleotide in a synthetic delivery system or a part thereof (for example, recognition and/or integration sequence) can comprise a nucleic acid sequence with at least 70%, at least 80%, at least 90%, at least 95%, or at least 99% sequence identity to any one or more of SEQ ID NOs: 1-277 and SEQ ID NOs: 282-349, or a fragment thereof. A recognition sequence can comprise a nucleic acid sequence with at least 70%, at least 80%, at least 90%, at least 95%, or at least 99% sequence identity to any one or more of SEQ ID NOs: 1-277 and SEQ ID NOs: 282-349, or a fragment thereof (for example, a functional fragment that an act as a recognition sequence as disclosed herein). An integration sequence can comprise a nucleic acid sequence with at least 70%, at least 80%, at least 90%, at least 95%, or at least 99% sequence identity to any one or more of SEQ ID NOs: 1-277 and SEQ ID NOs: 282-349, or a fragment thereof (for example, a functional fragment that an act as an integration sequence as disclosed herein).

[0147] In some embodiments, the polynucleotide comprises at least one substitution relative to any one of SEQ ID NOs: 1-277 and SEQ ID NOs: 282-349. In some embodiments, the polynucleotide comprises at least 10 substitutions relative to any one of SEQ ID NOs: 1-277 and SEQ ID NOs: 282-349. In some embodiments, the polynucleotide comprises at least 50 substitutions relative to any one of SEQ ID NOs: 1-277 and SEQ ID NOs: 282-349. In some embodiments, the polynucleotide comprises at least 100 substitutions relative to any one of SEQ ID NOs: 1-277 and SEQ ID NOs: 282-349. In some embodiments, the polynucleotide comprises at least 250 substitutions relative to any one of SEQ ID NOs: 1-277 and SEQ ID NOs: 282-349. In some embodiments, the polynucleotide comprises from about 1 to about 20 substitutions relative to any one of SEQ ID NOs: 1-277 and SEQ ID NOs: 282-349. In some embodiments, the polynucleotide comprises from about 20 to about 100 substitutions relative to any one of SEQ ID NOs: 1-277 and SEQ ID NOs: 282-349. In some embodiments, the polynucleotide comprises from about 50 to about 250 substitutions relative to any one of SEQ ID NOs: 1-277 and SEQ ID NOs: 282-349. In some embodiments, the polynucleotide comprises from about 150 to about 500 substitutions relative to any one of SEQ ID NOs: 1-277 and SEQ ID NOs: 282-349. In some embodiments, the polynucleotide comprises from about 250 to about 700 substitutions relative to any one of SEQ ID NOs: 1-277 and SEQ ID NOs: 282-349. In some embodiments, the polynucleotide comprises from about 500 to about 750 substitutions relative to any one of SEQ ID NOs: 1-277 and SEQ ID NOs: 282-349. In some embodiments, the polynucleotide comprises from about 500 to about 1,000 substitutions relative to any one of SEQ ID NOs: 1-277 and SEQ ID NOs: 282-349.

[0148] In some embodiments, a synthetic delivery system of the disclosure can be functional without requiring a commonly used delivery vector or delivery system, e.g., as “naked” DNA. For example, in some embodiments a synthetic delivery system does not require or utilize a viral vector, a nanoparticle, a lipid nanoparticle, a liposome, an exosome, a dendrimer, a gene gun, or electroporation.

[0149] In some embodiments, targeted cargo delivery via synthetic delivery systems disclosed herein can significantly reduce off-target and unwanted adverse effects associated with alternate delivery systems, for example, non-targeted delivery systems.

[0150] In some embodiments, a synthetic delivery system of the disclosure can be combined with or utilize a vector, such as a viral vector, a nanoparticle, a lipid nanoparticle, a liposome, an exosome, or a dendrimer.

[0151] In some embodiments, a candidate polynucleotide for use in a synthetic delivery system comprises a full length transposable element (e.g., retrotransposon). In some embodiments, candidate polynucleotide for use in a synthetic delivery system comprises a high rate of identified mutations, or more than one identified mutation (e.g., SNV), for example, favoring higher numbers of mutations relative to a reference sequence. The mutation can be shared between ctDNA-target cell coculture conditions and ctDNA alone, and not present or substantially not present in the genome of the untreated control cells. In some embodiments, a candidate polynucleotide for use in a synthetic delivery system is not located in an intron of a gene, or if present in an intron, is not close to an exon (e.g., at least 3 kb, 5 kb, or 10 kb from an exon).

[0152] In some embodiments, a synthetic delivery system disclosed herein does not elicit, substantially does not elicit, or elicits a reduced immunogenic response compared to an alternate delivery system, such as a viral vector.

[0153] In some embodiments, a synthetic delivery system disclosed herein comprises a conjugation moiety. The conjugation moiety can be attached at the 5′ end, the 3′ end, or at an internal site along the length of a polynucleotide. The conjugation moiety can be a nucleotide analogue (such as bromodeoxyuridine). The conjugation moiety can be a conjugating functional group. The conjugating functional group can be an azido group or an alkyne group. A conjugation moiety can further be derivatized through a chemical reaction such as click chemistry or any other bioconjugation reaction. The click chemistry can comprise a copper(I)-catalyzed [3+2]-Huisgen 1,3-dipolar cyclo-addition of alkynes and azides leading to 1,2,3-triazoles. The click chemistry can be a copper free variant of a reaction. The click chemistry can be an inverse electron-demand Diels-Alder reaction between a trans-cyclooctadiene and a tetrazine.

[0154] In some embodiments, the conjugation moiety as used herein can comprise a hapten group. A hapten group can include digoxigenin, 2,4-dinitrophenyl, biotin, avidin, or be selected from azoles, nitroaryl compounds, benzofurazans, triterpenes, ureas, thioureas, rotenones, oxazoles, thiazoles, coumarins, cyclolignans, heterobiaryl compounds, azoaryl compounds or benzodiazepines. A hapten group can include biotin. A nucleic acid comprising the conjugating moiety can further be linked to a second nucleic acid, a fluorescent moiety (such as a dye such as a quantum dot), or a conjugating partner such as a polymer (such as PEG), a macromolecule (such as a carbohydrate, a lipid, a polypeptide), for example.

[0155] TABLE 1 provides sequences of illustrative polynucleotides that can be used in a synthetic delivery system disclosed herein, for example, for delivery to cancer cells, e.g., hematologic cancer cells, such as multiple myeloma cells, B cells, and/or plasma cells.

TABLE 1

| SEQ ID NO | Description | Sequence |
|---|---|---|
| 283 | ALUSx | TTTTTCTTCTCTCTTTTTTTTTTATTTTTTGAGATGGAGTT |
| | | TCACTCTGTTGCCCAGGCTGGAGTGCAATGGTGCAGTCT |
| | | CAGCTCACTGCAACCTCCACCTCCCGGGTTTGAGCAGTG |
| | (ASLUSq2) | ATTCTGCCTCAGCCTCCCAAGTAGCTGGGATTACAGGCA |
| | | CCCACCACCATGCCTGGCTAATTTTTGTATTTTTAGTAGA |
| | | GATGGGGTTTCACCATGTTGGCCAGGCTGGTCTCGAACT |
| | | CCTGACCTCAGGTGATCCACCTGCCTCGGCCTCCCAAAG |
| | | TGCTGAAATTACAGGCATGAGCCACCGCACCTGGCC |
| 284 | L1MB3 | TTTTTGTATTTTTAGTAGAGATGGGGTTTCACCATGTTGG |
| | | CCAGGCTGGTCGAACTCCTGACCTCAGGTGATCCACCtG |
| | | CCTCGGCCTCCCAAAGTGCTGAaATTACAGGcaTGAGCCA |
| | | CCCCCAGAACTCTTCTCTTTCCCAAAACTAAAATTCTGC |
| | | ACCCATTGAACAGTAACTCCCCATTTCTCCTTTCCCCTAA |
| | | CTCCTGGCATCCACCATTCTGTTTTCTGTCTTTACGAATT |
| | | TTACTACCCTTGGTACTTCCTTTAAGTGGAATCATACAAT |
| | | ATTTTTCTTTTTCTGACTGGCTTATTTCACTAAGCATAAT |
| | | ATTTTTAAGGTTCAAGCATTTTGTAGCATATGTCAGAATT |
| | | TCCTTTCTTTTTAAAGCTCAATAATATTCCATTGTATGtAT |
| | | ATACCACATTTTACTTAACCATTCATCCgTCAGTGGACAc |
| | | TTGGGTTACTTCCAAcTTTTAGCTATTGTGAATAATGCTG |
| | | CTATGAACATGAATGTACAAATATCTnTTCGAGnCCCTGC |
| | | TTTCAATTCTTTTGGGTATATACCCAGAAGTGGAATTGCT |
| | | GGATCATATGGTAATTCTATTTTTAATTTTTTGAGGAACC |
| | | GCCATACTGTTTTCCACAGCGGCTGCACCATTTTACATTC |
| | | CCACCAGCAGTGCACAAGGGTTCCAATTTCTCCACATCC |
| | | TCGCCAACACTTGTTATTTTCTGTTTTTTTGATAGTAGCC |
| | | ATCCTAATGGGTGTGAGGTGGTATCTCATTGTGGTTTTG |
| | | ATTTGCATTTCCCTAATGATTAGTGATGTTGAGCATCTTT |
| | | TCATGTGCTTATTGGCCATTTGTATATCTTCTTTGGAGAA |
| | | ATGTCTATTCAAGTCCTTTGCCCATTTTTnAATCGGGTTG |
| | | TTTGTTTTTTTGTTGTTGAGTTGTAGGAGTTCTTTATATAT |
| | | TCTGGATATTAA |
| 285 | L2a | TCTCACCACCTCTACTACTGCCTATCTGCATCTGGGTGCA |
| | (2L2a) | CGTCCTCTGCTATTCCTTCTGTTTCTACAGAAGCTGTCCA |
| | | TATTTCTAAGGCTAATCCCTTGCATTTTGGTACCAGACTT |
| | | CCCTGACCTACACAAAGATGATCACCCCCCAAAATTGCC |
| | | TTTCTTTCCTGCATCAAGTTTTTTCTTCTCTACTGTATTAT |
| | | TCCTATTGCACATTAGCCCAAAAAATGCCGTTGTTTTTCC |
| | | ATCGGTAAAAAAAAAAAATAGAGAGAAAAAGAAAAAT |
| | | AATCCATTGCCGCCAATCTATCTTCTAGTCATTTTTCCAT |
| | | TTCTCTGTTCTCCATTCTGCATAAACCATTTTTACTTGAA |
| | | TTGTTTATACTTGCTGTTTACAACAAACCTCCTCTTTCTC |
| | | TCCACCCCAATCAGATTTTGGTCCACATTCCTCATGCAGT |
| | | GGTCAGTCCTTGGTCCTCAACCTAGTCTAGCCTGCTTGCT |
| | | GGTGGGTGTGCTCTCGGGGCATTTGCTTGTGTTTGCACG |
| | | ACAGCTCAGTCCCTCACTTCTCTCAAGTCTTTGCTAATAA |
| | | CACTCTTGCATCCAAGTCTTCCCTGACCTGCTACTTAAAA |
| | | ACAACTCACCCCCACCCCTAGAAATCCCTATCCTCTTCC |
| | | CTACGCTTTATTTTTCTCCATAATACTTATCACCATGTAG |
| | | CTGAACATGTATTTTACTCACTTTTTTTTATATTGTCCAT |
| | | CTTCCCTCAGTGAATTGAAAGCTCCATGAGGGCAGGAGG |
| | | TTTTGTTTATTGTGTTTACTGCTTTATCCCTAGCACCCAG |
| | | CACAGCATATGTGATATAGTAGACACTCAATACAAATCT |
| | | GATGTGTGTGTGTCT |
| 286 | THE1C | TGATATGGTTTGGCTGTGTCCCCACCTAAATCTCATCTTG |
| | (ERVL-MaLR) | AATTGTAGTTCCCATAATCCCCATGTGTCAtGGGAGGGA |
| | | CCCAGTGGGAGGTAATTTAATCCTGGGGGCAGTTACCCT |
| | | CCTGCTATGTGTGTGTGTGTGTGTGTGTTCTCACGAGATC |
| | | TGATGGTTTTATAAGGGGCTTTTCCCCCTTCGCTCGGCAC |
| | | TTCTCCTTCCTGCCGCCATGTGAAGAAGGACGTGTTTGC |
| | | TTCCCCTTCCGCCATGATTGTAAGTTTCCTGAGGCCTCCC |
| | | CAGCCATGCnGAACTGTGAGTCAATTAAACCTCTTTCCTT |
| | | TATAAATTACCCAGTCTCGGGTGTGTCTTTATTAGCAGC |
| | | GTGAGAACGGACTAATACA |
| 287 | ALUY (ALU) | TTTTGCTCTTCTTTTTTTTTTTTTTTTTGAGAGACGGAGTC |
| | | TCGCTCTGTCTCCCAGGCTGGAGTGCAGTGGCGCGATCT |
| | | CGGCTCACTGCAAGCTCCGCCTCCCGGGTTCACGCCATT |
| | | CTCCTGCCTCAGCCTCCCGAGTAGCTGGGACTACAGGCG |
| | | CCCGCCACCACGCCCGGCTAATTTTTTGTATTTTTAGTAG |
| | | AGACGGGGTTTCACCGTGTTAGCCAGGATGGTCTCGATC |
| | | TCCTGACCTCGTGATCCGCCCGCCTCGGCCTCCCAAAGT |
| | | GCTGGGATTACAGGCGTGAGCCACCGCGCCCGGCC |
| 288 | LIME4b | TATTTACATTATTTTAATAGGTAATGCAATTACATCTTCT |
| | | AAAATTCAGAAAGCATAAAAGTACATAAGAGAAAAACT |
| | | CATCATCCAGCCCTTGCCCTTGAGGACGCTAGTTTCTAC |
| | | CCACACAGCTAAACCTTGTTACAAATTACTTGGGTGTAT |
| | | TACCAGTGGCATTGCCAGGTTTAACAAATAAAAACATAG |
| | | GATTCCTGATTAAGTTTAATTTTCAGATAAATAATTACAT |
| | | GCTTTTTAAGTAGAAGTATTTCCCAAATATTACAAGAGA |
| | | CAATATATTTAAAAAATTGTTTGATATCCAAATTTAACT |
| | | ATGCGTCCTATATTTTGTCTGGCAACCCTAATCCTTCATT |
| | | GTATGGATGTACCCCAGGTTCTTATGCAAATAGAGAAAA |
| | | TATGCACTCTTTTATTATCCTCCGTCCCTTTCTTTTACAG |
| | | ACAATGATAGAATGCTTTATTTAGTACATACGTCATTCT |
| | | GCACCTGTGCGAGTATTTTAGTTAACCACACTTTTGGGG |
| | | ATTGTTCTGCTATCATAAAAGATATTTCTCTTTTTTACCA |
| | | TAATGTATTTCATTAAACCCTCTTTCACAGGTTAGGTCCC |
| | | ATATTTTTCTTTTTTTTTTTTTTTTTGAGAGACGGAGTCTC |
| | | GCTCTGTCTCCCAGGCTGGAGTGCAGTGGCGCGATCTCG |
| | | GCTCACTGCAAGCCTGATAGGTGAAAAATGGTATCTCAG |
| | | TGTAGTTTTAATTTGCATTTCTCTTATTATGAGTGAGGTT |
| | | GAGCATCTTTTCATATGTTTAAGAGCCATTTGTATTTCCT |
| | | TTTCTGTGAACTGTCTGTCCGCCTCCCGGGTTCACGCCAT |
| | | TCTTGGGTTGTTGGTCTTTTTCTTATTGACCTGCCTCAGC |
| | | CTCCCGAGTAGCTGGGAAATCTA |
| 289 | ALUSx | GGTCAGTCGCGGTGGCTCATACTTGTAATCTCAGCACTT |
| | (ALUSg2) | TGGGAGGCCAAGGCGGGTGGATCACCTCAGGTCAGGAG |
| | | TTCAAGACCAGCCTGACCAATGTGGTAAAACCCTGTCTC |
| | | TACTAAAAATACAAAAATTAGCTGGGCGTGGTGGCACA |
| | | TGCCTGTAATCCCAGCTACTCAGGAGGCTGAGGCAGGA |
| | | GAATCGCTTGAACCCGGGAGGCAGAGGTTGCAGTGAGC |
| | | CAAGATAACACCACTGCACTCCAGCCTGGGTGACAGAG |
| | | CAAGACTCCGTCTCAAAAAAAAAAAAAAAAGATCCAGT |
| | | GATAGG |
| 290 | MIR | TATCTATTCACATTTATATGCTCTTAGTCAGAAAATAAA |
| | | ATACCTCTCTTGAAATGGGCCTGACTCCGGAGAGGGAGA |
| | | CCAGATTCACTGCAAGCTCCGCCTCCCGGGTTCCCGCCA |
| | | TTCTCCTGCCTCAGCCTCCCCAGTAGCTCTGACTACAGG |
| | | CGCCCGCCACCACGCCCGGCTAATTTTTTTATTTTTTAGT |
| | | AGAGACGGGGTTTCACCGTGTTAGCCAGGATGGTCTCGA |
| | | TCTCCCAACCTCGTGATCCGCCCGCCTCGGCCTCCCAAA |
| | | GTGCTGGGATTACAGGCATGAGCCACCGCGCCCGGCC |
| 291 | AluY | TTTTTTTTTCTTTTTTTTTTTTTTTCTTTTGAGACGGAGTCT |
| | (ALU) | TGCTCTGTCGCCCAGGCTGGAGTGCAGTGGCGCGATCTC |
| | | GGCTCACTGCAAGCTCCGCCTCCCAGGTTCATGCAATTC |
| | | TCCTGCCTCAGCCTCCCGAGTAGCTGGGACTACAGGCGC |
| | | CCGCCACCACGCCCGGCTAATTTTTTGTATTTTTAGTAGA |
| | | GACGGGGTTTCACCGTGTTAGCCAGGATGGTCTCGATCT |
| | | CCTGACCTCGTGATCCGCCCGCCTCGGCCTCCCAAAGTG |
| | | CTGGGATTACAGGCGTGAGCCACCGCGCCCGGCC |
| 292 | ALluY | TGCTGGGCATGGTGGCTCACGCCTGTAATCCCAGCACTT |
| | | TGGGAGGCCAAGGCGGGCAGATCACGAGGTCAGGAGTT |
| | | CGAGACCATCCTGGCTAACACAGTGAAACCCCGTCTCTA |
| | | CTAAAAATACAAAAAATTAGCCGGGCGTGGTGGCGGGT |
| | | GCCTGTAGTCCCAGCTACTCGGGAGGCTGAGGCAGGAG |
| | | AATGGCGTGAACCCAGGAGGCGGAGCTTGCAGTGAGCT |
| | | GAGATTGCGCCACTGCACTCCAGCCTGGGTGACAGAGC |
| | | GAGACTCCTCTTCAAAAAAAAAAAAAAAAAAAAAAAGA |
| | | CTCAT |
| 293 | AluJb | GGCCGGGCGCGGTGGCTCACGCCTGTAATCCCAGCACTT |
| | (ALU) | TGGGAGGCCGAGGCGGGnGGATCGCTTGAGCCCAGGAG |
| | | TTCGAGACCAGCCTGGGCAACATGGCGAAACCCCGTCTC |
| | | TACAAAAAATACAAAAATTAGCCGGGCGTGGTGGCGCG |
| | | CGCCTGTAGTCCCAGCTACTCGGGAGGCTGAGGCGGGA |
| | | GGATCGCTTGAGCCCGGGAGGTCGAGGCTTCAGTGAGCT |
| | | GAGATCAcgCCACTGCACTCCAGCCTGGGTGACAGAGcgA |
| | | GACTCtGTCTCAAAAAAAATAAATAAAAAATAAAAATAA |
| | | AA |
| 294 | AluSx | GGCCGGGCGCGGTGGCTCACGCCTGTAATCCCAGCACTT |
| | (AluSg) (ALU) | TGGGAGGCCGAGGCGGGCGGATCACCTGAGGTCAGGAG |
| | | TTCGAGACCAGCCTGGCCAACATGGTGAAACCCCGTCTC |
| | | TACTAAAAATACAAAAATTAGCCGGGCGTGGTGGCGCG |
| | | CGCCTGTAATCCCAGCTACTCGGGAGGCTGAGGCAGGA |
| | | GAATCGCTTGAACCCGGGAGGCGGAGGTTTCAGTGAGC |
| | | TGAGATCACGCCACTGCACTCCAGCCTGGGTGACAGAGC |
| | | GAGACTCTGTCTCAAAAATAAATAAATAAATAAAAAAT |
| | | AAAAA |
| 295 | MER11C | TATCGAAAATTCACCCCCGATATTCACGTAGGTTCTTTTC |
| | (LTR) | TATTTTCCCTAAGCGTCGGCAGGTTTGAGAAATAAAGGG |
| | (ERVK/LTR) | ACAGAGTACAAAAGAGAGAAATTTTAAAGCTGGGCGTC |
| | | CGGGGGAGACATCACATGTTGGTAGGTTCCATGATGCCC |
| | | CACAAGCCGTAAAAACCAGCAAGTTTTTATTAGTGATTT |
| | | TCAAAAGGGGAGGGAGTGTACGAATAGGTGTGGGTCAC |
| | | AGAGATCACGTGCTTCACAAGGTAATAGAATATCACAA |
| | | GGCAAATGGAGGCAGGGCGAGATCACAGGACCACAGGA |
| | | CCGGGGTGAAATTAAAATTGCTAATGAAGTTTTGGGCAC |
| | | CATTGTCATTGATAACATCTTATCAGGAGACAGGGTTTG |
| | | AGAGACAACCGGTCTGACCAAAATTTATTAGGTGGGAA |
| | | TTTCCTCGTCCTAATAAGCCTGGGAGTGCTATGGGAGAC |
| | | TGGGGCTTATTTCATCCCGTAGAGGCAACCATAAAAGAC |
| | | AGGCCCAAGCGGCCATTTAGAGCCTCCCAGGACATTCTC |
| | | TTTCTCAGGGTGTTCCTTGCTGAGAAAAAGAATTCAGAT |
| | | ATTTCTCCATTTGCTTTTGAAAGAAGAGAAATATGGCTC |
| | | TGTTCCCGGCTCACGGCGCAGATTTAAGGTTATCTCCTTT |
| | | TCCCTGAACAATTGCTGTTATCCTGTTCTTTTTTCAAGGT |
| | | GCCCAGATTTCATATTGTTCAAACACACATGCTTACAAT |
| | | TTGTGCAGTTAAGCAATATCACAGGGTCCTGAGGGACAT |
| | | ACATCCTCCTCAGCTGACAGGATTAAGAGATTAAAGTAA |
| | | AGACAGGCATAGGAAATCACAAGGGTATTGATTGGGGA |
| | | AGTGATAAGTGTCCATGAAATCTTCACAATTTATGTTTA |
| | | GAGATTGCAGTAAAGACAGGCATAAGAAATTATAAAAG |
| | | TATTAATTTGGGGAACTAATAAATGTCCATGAAATCTTC |
| | | ACAATCCACGTTCTTCTGCCATGGCTTCAGCCGGTCCCTC |
| | | CGTTCGGGGTCCCTGACTTCCCGCAACA |
| 296 | THE1A | TGATATGGCTTGGCTGTGTCCCCACCCAAATCTCATCTTG |
| | (LTR) | AATTGTACGTTCCATAATTCCCATGTGTTGTGGGAGGGA |
| | | CCCAGTGGGAGATAATTGAATCATGGGGAGCAGTTTCCC |
| | | CCATACTGTTCTCATGGTAGTGAATAAGTCTCATGAGAT |
| | | CTGATGGTTTTATCAGGGGTTTCTACTTTTGCATCTTCCT |
| | | CATTTTCCTCTTGCCACcACCATGTAAGAAGTGCCTTTCA |
| | | CCTCCCACCATGATTCTGAGGCCTCCCCAGCCATGTGGA |
| | | ACTGTAAGTCCAATTAAACTTCTTTTTCTTCCCAGTCTTG |
| | | GGTATATCTTTATCAGCAGCATGAAAATGGACTAATACA |
| 297 | AluY | TTTTTTTTTTTTTTTTTTTTTTTTTTTTTTGAGACGGAGTCT |
| | | CGCTCTGTCGCCCAGGCTGGAGTGCAGTGGCGCGATCTC |
| | | GGCTCACTGCAAGCTCCGCCTCCCGGGTTCACGCCATTC |
| | | TCCTGCCTCAGCCTCCCGAGTAGCTGGGACTACAGGCGC |
| | | CCGCCACCACGCCCGGCTAATTTTTTGTATTTTTAGTAGA |
| | | GACGGGGTTTCACCGTGTTAGCCAGGATGGTCTCGATCT |
| | | CCTGACCTCGTGATCCGCCCACCTCGGCCTCCCAAAGTG |
| | | CTGGGATTACAGGCGTGAGCCACCGCACCCAGCC |
| 298 | AluSx | TTTCTTTACTTCAACCTTCTTTTTTTTTTTGAGACAGAGTC |
| | | TGCTCTCGTTGCCCAGGCTGGAGTGCAATGGCGCAACCT |
| | | CAGCTCACTGCAACCTCTGCCTCCTGGGTTCAAGCAATT |
| | | CTCCTGCCTCAGCCTCCCAAGTAGCTGGGATTACAGGCA |
| | | TGCGCCACCACGCCCAGCTAATTTTGTATTTTTAGTAGA |
| | | GACGGGGTTTCACCATGTTGGCCAGGCTGGTCTTGAACT |
| | | CCTGACCTCAGGTGATCCACCCGCCTCAGCCTCTCAAAG |
| | | TGCTGGGATTACAGGCGTCAGCCACCGCACTCAGCC |
| 299 | AluY | GGCCGGGCGCGGTGGCTCACGCCTGTAATCCCAGCACTT |
| | (FLAM_C) | TGGGAGGCCGAGGCGGGCGGATCACGAGGTCAGGAGAT |
| | (ALU) | CGAGACCATCCTGGCTAACACGGTGAAACCCCGTCTCTA |
| | | CTAAAAATACAAAAAATTAGCCGGGCATGGTGGCAGGC |
| | | ACCTGTAGTCCCAGCTACTCAGGAGGCTGAGGCAGGAG |
| | | AATGGCGTGAACCCAGGAGGCGGAGCTTGCAGTGAGCC |
| | | GAGATCATGCCACTGCACTCCAGCCTGGGTGACAGAGTG |
| | | AGACTCCATCTCAAAAAAATGACACAAAATAAAATAAA |
| | | ATAA |
| 300 | AluSx | GGCCGGGCGTGGTGGCTCATGCCTGTAATCCTAGCACTT |
| | (AluSx1) | TGGGAGGCCGAGGCTAGCGGATCACCTGAGGTCAGGAG |
| | | TTTGAGACCAGCCTAGCCAACATGGCGAAACCCTGTCTC |
| | | TACTAAAAATACAAAAAATGGCTGGGCATGGTGGCAGA |
| | | CATCTGTAATCCCAGCTACTCAGGAGGTTGAGACAGGAG |
| | | AATTGCTTGAACTCAGGAAGCGGAGGTTGCAGTGAGCT |
| | | GAGATTGCGCCACTGCACTCCAGTCTGGGTGACAGAGCA |
| | | AGACTCTGTCTCAAAAAAATAAAATAAAATAAAAATAA |
| | | AATA |
| 301 | AluY | GGCCGGGCGTGGTGGCTCATGCCTGTAATCCTAGCACTT |
| | (AluSx1) | TGGGAGGCCGAGGCTAGCGGATCACGAGGTCAGGAGTT |
| | | TGAGACCAGCCTAGCCAACATGGCGAAACCCTGTCTCTA |
| | | CTAAAAATACCAAAAAATGGCTGGGCATGGTGGCAGAC |
| | | ATCTGTAATCCCAGCTACTCAGGAGGTTGAGACAGGAG |
| | | AATTGCTTGAACTCAGGAAGCGGAGGTTGCAGTGAGCT |
| | | GAGATTGCGCCACTGCACTCCAGTCTGGGTGACAGAGCA |
| | | AGACTCTGTCTCAAAAAAATAAAATAAAATAAAAATAA |
| | | AATA |
| 302 | ALR/Alpha | TTCTTCTCACGGAGTGAAACTTTTCCTTTGATTGAGCAGT |
| | (Satellite/centr) | TTCGAAACTCTCTTTTTGTAAAATCTGCAAGTGAACATTT |
| | | GGAGTGCTTTGTGGCCTATGATAGAAAAGGAAATATTTT |
| | | CACTTAAAATCTAGACAGAAGCAATCTGAGAAACTTCTT |
| | | TGTGATGTTTGTATTCATCTTACATAGTTAAACCTTTCTT |
| | | TTGATTGAGCAGTTTTGAAACTCTCTTTTTGTCGAATCTG |
| | | TAAGAGGACATTTGGAGTGCTTTCAGGCCTATGGTGAAA |
| | | AAGGAAGTATCTTCTCATGAAAACTAGACAGAAGAATT |
| | | CAGACAAACTTCTTTGTGATGTGTGCATTTATCTCACAG |
| | | ACTTGAACCTTTCTTTTGATTGAGCAGTTTGAAACACTCT |
| | | TTTTGTAGAATCTGCAAGTGGACATTTGGAGCACGTGGA |
| | | GGCCTATAGTGGAAATGGAAATGTCTTCACACTAAAAAC |
| | | TAGACAGAAGAATTCTGAGAAACTTCTTTGTGATCTTTG |
| | | CATTCATCTCACAGAGTTGAACCTTTCTTTTCATTGAGCA |
| | | GTTTGAAAACACTCTTTTTGTAGAATCGGCAAGTGGACA |
| | | TTTGGAACGCATTGCAGACTATGATGGAAAAGGAAATA |
| | | TCTCCA |
| 303 | Alu | CAGCGCAAGTAATATATCCTGGAATTGGAAGCAGAATG |
| | (SINE/Alu) | GGAACTATGGACTCAGTGAAGATTGTTCTGGACATTATT |
| | | TGATTCTTCTTTCTCGCTGCCAATTGGATACTTTTTTTTTT |
| | | TTTTTGAGACAGAGTCT |
| 304 | Alu | CAGCGCAAGTAATATATCCTGGAATTGGAAGCAGAATG |
| | (SINE/Alu) | GGAACTATGGACTCAGTGAAGATTGTTCTGGACATTATT |
| | | TGATTCTTCTTTCTCGCTGCCAATTGGATACTTTTTTTTTT |
| | | TTTTGAGACAGAGTCT |
| 305 | ALR/Alpha | TTCATCTTACAGAGATAAACATTTATCTTGATTCAGCAG |
| | (Satellite/centr) | TTTGGAAACACTGTTTTTATCCATTCTGTGAATGGACATT |
| | | TGGGAGTTCATTAAGGCACACATGAAAAGGTGTATATCC |
| | | CAGGGTAAAAACTAGAAGGAAGCTATCTGAGAAACCAC |
| | | TCTGTGGTGTGTGCATTGATCTCGCTGATTTAAAGCTTTC |
| | | TTTTGATTCAGCAGTTTGGAATCACTGTTTGTGCTCATTC |
| | | TGTAAATGGATATTTGGGAGCTCATTGAGGTCAATGGCA |
| | | AAAAAGTGAATAACTGAGGATAAAAACTAGAAATAAGC |
| | | TATCTGAGAAACGGATTTATGATGTGTGCATTCATCTCG |
| | | CAAAATTAAACATTTCTTTTCCTTCAACAGTTTGGAAAC |
| | | ACGGTTTTTATAGGATCTGCAAAGGGATATTTTGGAGCA |
| | | CATTGAGGTCTATGGTGTAAAAGAAAATATCTTCAGATA |
| | | AAACCTAGAAAGAAGCTTTCTGAGAAATTGCATTTTGAT |
| | | GTGTGCATTCATCTCACAGAGTTAATACTTTTTTTTGATT |
| | | CACCAGTGTGGATACACTGTTTTTGTCCATTCTGCTAATG |
| | | GACCTTTGGGGGCTCATTTAGGCCAATGGCAAAAAAGTG |
| | | AATATCCCAGGATAAAAACTAGAAGGAAGGTATCTGAG |
| | | AAACTGCTATGTGATGTGTGCCATCATCTCACAGTCTTA |
| | | AAAGTTTCTTTTCATTCACCAGTTTGGAAACAGTGTTTTT |
| | | GTAGAATCTGCAAAGTCATATTTTTGAGT |
| 306 | ALR/Alpha | GATGAATGCACATATCACAAAAAGTTTCTCAGATTGCTT |
| | (Satellite/centr) | CTGTCTAGATTTTATGTGAAGTTATTTCCTTTTCTACCAT |
| | | AGAACCCAAAGCACTTATAATGTCCCCTTGCAGATTCTA |
| | | CAAAAAGAATGTTTCAAAACTGCTCAATCAAAAGAAAG |
| | | GTTCAAATTTGTGAGATGAATGCTCGCATCACCAAGAAG |
| | | TTTCTCAAAATACTTCTGTCTAGTTTTTATGTGAAGACAT |
| | | TTCTTTTTCCGTGATAGGTCTCAAAATGATCAAAATTTCC |
| | | ACTTGCAAATTCTACAAAAAGAGAGTTTCAAAGCTGCTC |
| | | AATCAAAAGAAAGGTTTATATCTGTGAGATGAACACAC |
| | | ACTTCACAAAGCAGTTTCTAAGATTTCTTCTGCCTAGATT |
| | | TTATGTAATGATATTTCCTTTTCTACCATACTTTGCAAAC |
| | | TGCTCCAAATGTCCACCTGTAGATTCTACAAAAACAGTG |
| | | TTTCCAAACTGCTCAATCAAAAGAAAGGTTAACTCTGTG |
| | | AGATGAACTCACACATCACAAAGAAGTTTCTCAGAATTC |
| | | TTCTGTCTAGTTCTAATGTGAAGATATTTCCTTTTGGACC |
| | | AGAGGCCCCAAGGCTATCGAAATGTCCCCTTGTAGATTC |
| | | TACAAAAAGAGTATTTCAAAACTGGTCCATCAAGAGAA |
| | | AGGCTCAACTCTGGGAGATGAATGCACACATCACAAAG |
| | | AAGTTTCTCAGAATGCTTCTATCTAGTTTTTACATGAAGC |
| | | TATTTCCTTTTCCACCATAAGCCTCAAAGCGCTCCAAAT |
| | | GTCCACTTGCAGGTTCTGCAAAAAGAGAGTTTCCAAAGT |
| | | TCTCAATCAAAAGAAACGGTTAACTCTGTGAGATAAATG |
| | | CACACATCACAAAGAAGTTTCTCAGAATTTTTCTGTCTA |
| | | GTTTTTGTGTGAAGATATTTCATTTTC |

[0156] TABLE 2 provides sequences of illustrative polynucleotides that can be used in a synthetic delivery system disclosed herein, for example, for delivery to cancer cells, such as pancreatic cancer cells.

TABLE 2

| SEQ ID NO | Description | Sequence |
|---|---|---|
| 307 | AluSx | AGCCAGGTGCAGTGGCTCACACCTGTAATCCCAGCACTT |
| | (AluSx1) | TGGGAAGCTGAGGCGGGTGGATCACTTGAGGTCAGGAG |
| | | TTCGAGACCAGCCTGGCCAACATGGTGAAACCCCGTCTC |
| | | TACTAAAAAAGTAAAAATTAGCCAGGTGTGGTGGCGGG |
| | | CACCTGTAATCCCAGCTACTCAGGAGGCTGAGGCAGGA |
| | | GAATTGCTTGAACCCGGGAGGCGGAGGTTGCAGTGAGC |
| | | TGAGATTACACCACTGCACTCCAGCCTGGGCAAGAGAG |
| | | CGAGAATCCGTCTCAAAAAAAAAAAAACAAAAAAAACA |
| | | AAAAAC |
| 308 | MIRc | AATTACAACAACCCTTAATATTTGTAAAGCGCTTGATAA |
| | (MIRB) | TTCAGGGAGGGCTTTTAAAAACTTCTATCCATCTCTTCCC |
| | (MIR) | CCCAGCAATCCTATGAGGTAGGCAGGGCTGGAATCATTT |
| | | GCTGCATTTTATCGAATAGGAAGCCATGACTCGTAGAGG |
| | | TCTGGTGACTTAACTGAGGTCACCCACTGAGGACGTGGC |
| | | AGAGCTGGGTCCTGAATCTGTGGCCCTCAGGCTCTTTGC |
| | | CTGGCCCTGCCTCACATAGACTACGCTGCCTCT |
| 309 | AluJb | TTTCTTACTTTTTTTATTTATTTTTTTCTTGAGACAGGGTC |
| | (AluSx1) | TCACTTGGTCACCCACGCTGAAGTGCAGTGGCgTGATCT |
| | | TAGCCCACTGCAACCTCTACCTCCCGGGCTCAAGcGATC |
| | | CTCCCTCCTCAGCCTCCTGAGTAGCTGGGACCACAGGCA |
| | | TCTGCCACCACACCCAGCTAATTTTTGTATTTTTAGTAGA |
| | | GATGGGGTTTCACCATGTTGGTCAGGCTGGTCTCAAACT |
| | | CCTGgCTTCAaGTGATCTGCCCACCTCAGCCTCCCAAAGT |
| | | GCTGGGATTACAGATGTGAGCCACTGCGCCTGGCC |
| 310 | AluSx1 | TTGATTTTTTTTTCTTTTATCTTTTTTTTTGAGACAGAGTT |
| | (AluSq) | TTGCTCTGTTGCCCAGGCTGGAGTGCAGTGGCGTGATCT |
| | (ALU) | TGGCTCACTGCAGTGTCCGCCTCCTGGGTTCAAGCGATT |
| | | CTCCTGCCTCAGCCTCCTGAGTAGCTGGGATTACAGGCA |
| | | TGCACCACCACGCCCGGCTTCATTTTTTATTTTTAGTAGA |
| | | GACAGGGTTTCACCATGTTGGTCAGGCTGGTCTCGAACT |
| | | CCTGACCTCAGGTGATCCACCCGCCTTGGCCTCCCAAAG |
| | | TGCTGGGATTACAGGCGTGAGCCACCGTGCCCGGCC |
| 311 | AluSx | GGCTGGGCATGGTGGTTCACGCCTATAATCCCAGCACTT |
| | (AluSp) | TGGGAGGCCGAGGCAGGCAGATCACCTGAGGTCGGGAG |
| | (Alu) | TTCGAGACCAGCCTGACCAATATGGTGAAACCCCGTCTC |
| | | TACTAAAAATACAAAAATTAGCCGGGCGTGGTGGTGCA |
| | | TGCCTGTAATCCCAGCTACTTGGGAGGCTGAGGCAGGAG |
| | | AATCGCTTGAACCCAGGAGGCGGAGGTTGCAGTGAGCC |
| | | GAGATTGCGCCACTGCACTCCAGCCTGGGTAACAGAGC |
| | | GAAACTCCGTCTCAGAAAAAAAAAAAGGCAGATATGAA |
| | | AAAGG |
| 312 | MTL2B4 | AATATTAATTTGGGCTCTCCAGAGAAACAGAACCAATAG |
| | (MTL2B4) | ATTACACATAGATATATAGAAAGACAGTTATTACAAGG |
| | (ERVL) | AATTGGCTCACAGGATTATGTAGGCTGAGAAGTCCCATG |
| | | ACCTGCCGTCTGCAAGCTGGAGACCCAGGAAAGCCGGT |
| | | GGTGTAGTTCCAGTCCGAGTTGGGAGGTCTGAGAATCGG |
| | | GAGAGCTGACAGAGTAAGCTCTAGTTGCAGCCTGGAGT |
| | | CCAGAGGGCAAAGAACACCTATGTCCCATCTCAAGCAC |
| | | GGTCAGGCGTCCCAGCTCAAGCAGAGAGAAAGAAGACT |
| | | TTCCTGCTCAGCCTCCTTGCTCTAAGCAGCCTCCCGACG |
| | | GATTGGATGAAGCTCACCCACGCTGGGGAGGGCAGCCA |
| | | CCTTCACTCAGTCCACCAATTCAAATGCTAATCTCATCC |
| | | AGAAACACCCTCACAGGCACACCCAGAAATAATGTTTA |
| | | GCCACATATCTGGGCATCCTGAGGACCAGTCAAATTGAC |
| | | TCATAAGTCTCACCATCATA |
| 313 | AluSx1 | TTATGACTATTATTTCTTTTTTTTTTTTTTGAGATGGAGTC |
| | | TCGCTCTATTGCCCAGGCTGGAGTGCAGTGGCATGATCT |
| | | CGGCTCACTGCAACCTCTGCCTCCCGGGTTCAAGCGATT |
| | | CTCCTGCCTCAGCCTCCTGAGTAGCTGGGATTACAGGTG |
| | | CCTGCCACCACACCCGGCTAATTTTTGTATTTTTAGTAGA |
| | | GATGGGGTTTCACTGTGTTGGCCAGGATGGTCTTAAACT |
| | | CCTGACCTCAAGTGATCCACCCACCTCGGCCTCCCAAAG |
| | | TGTTGGGATTACAGGCGTGAGCCACCATGCCCGGCC |
| 314 | L2a | CTCCATGTTCTGACCTCAGGTGATCtGCCCgCCTCCGCCT |
| | (L2a/LTR40b/MLT1J2) | CCCATAAGTTCCTTCTGCACCTATTCCATTCCATCTGCAA |
| | | TGTCATCCTGGCCAACCTGTGAATGGGTATAGCAGGATA |
| | | GTAAGTTAGTCCCAGTGTTTAGGCAGACTCCATAGACCA |
| | | GATTTAACGTGTTTGTATAAACCGCATGGCTCGCTCTTA |
| | | CTCAGCCTTCGGGTCGGCCTTAAGATACACAGTTTTAAG |
| | | AAAAGCATTGTCTTCACTCTTAGTGTAGATCAGGTCCTC |
| | | CTCnCCCCCAnCACGTTATGTCCCTGTCATTGAACATTAT |
| | | ACTTTTATGAAGAATTGTGAGCTGTCTGAGATTTTACCTT |
| | | ACTTGCAAaCTAACAAGTGGGCCTGCCAtAGTTTCATGTC |
| | | TGGCAGAAGACTCCAACAGGTCAGAGATTTTCATCTGTC |
| | | TTGTTCACTATTGTCTACATAGTGCCTGGAAAAATGCCT |
| | | GGCACACAGTAAACCCTCAATCAGTATTTTATGAATGAG |
| | | TGAAC |
| 315 | MTL1J2 | TGTGTTAGTCAGGATAGGCTAACCTCTGTAACACACAAC |
| | (parAluSp- | CCCAATTTTTCAGTGGCTCAGAACAATAGGAGTTTCTTT |
| | FULLMTL1J2) | CTTACTCATGTAAAGTCCAGGTGTGGCAGAAACTTGCGG |
| | (LTR) | GGGAGAAAGTCTACTCCACAGCATCACTCAGGGACCCA |
| | | GGCTCCTGCCTTACGGTGGTTCCGCCATTTTCCAGGGCCT |
| | | CGGAGTCCTCCATCCCATCTCCTCCATTCAGCTGGTGGA |
| | | TGTGGGAGGAGAGCGTGTATGAAAGACCACACAGAAGC |
| | | TTTTTTTGGGCCAGGCTTTGAGACGGCGCACATCAGTTT |
| | | CgCTCTTGTTGCCCAGGCTGGAGTGCAATGGcGCAATCTC |
| | | GGCTCACCGCAAAAGACACTGGGAAATTTGGTCTGGCC |
| | | ATGTGTCTAGGAAGCAGAGGAGATGGGGTTTCAtAAACT |
| | | CCTGAACTCTCTCTACCACG |
| 316 | AluSx | GGCCGGGTGCAGTGGCTCATGCCTGTAATCCCAGCACTT |
| | (AluY) | TGGGAGGCCGAGGCGGGTGGATCACCTGAGGTCAGGAG |
| | | ATCAAGACCATCCTGGCTAACACGGTGAAACCCCATCTC |
| | | TACTAAAAATACAAAAATTAGCTGGGCGTGGTGGCAGG |
| | | CGCCTGTAGTCCCAGCTACTCGGGAGGCTGAGGCAGGA |
| | | GAATGGCGTGAACCCAGGAGGCAGAGCTTGCAGTGAGC |
| | | CGAGATTGAGCCACTGCACTCCAGCCTGGGGGACAGAG |
| | | CAAGACTCTGCCTCAAAAAAAAAAAAAAATGGAAAAAA |
| | | AAAAAA |
| 317 | (MIRB) | AAGATGGGGAGGATGGTGGTGGAGCAGGCTGGGGAGAT |
| | (MIRc-part L2) | GAGGAGCTTGAGGGGCCTAGGAGCTAACCACCCATTCA |
| | (MIRc) | CTGTTTATGGGTGGGGTGGCTCCGGGCAGGTGGCCTGAC |
| | | CCCTCTAAACCTCAGTTTCCCCATCTGTAaAATGGgAGTA |
| | | aTTGTACCTGCCTCACGGGCATGTAGCAGGTGGGAGAGA |
| | | GAGTAATACGGGCAAGACGTCTAGTGCaGTGGCTGGAAC |
| | | ATAACAAGCACCCAGCAAGTGGTGGCCCCATTGCT |
| 318 | AluSx | GGCCGGGCACGGTGGCTCAAACCTATAATCCCAGCACTT |
| | AluSq | TAGAAGGCCAAGGCGGGCAGATCACCTGAGGTCAGGAG |
| | | TTCAAGACCAGCCTGGCCAACATGGTGAAACCCCGTCTC |
| | | TACTAAAAATACAAAAATTAGCCAGGTGTGGTGGCGGG |
| | | CACCTGTAATCCCAGCTACTCGGGAGGCTGAGGCAGGA |
| | | GAATCACTTGAACCCAGGAGGCGGAGGTTGCAGTGAGC |
| | | CGAGATCATGCCACTGCACTCCAGCCTGGGCAACAGAGT |
| | | GAAACTCTGTCTCAAAAAAAAAAAAAAAAAAAAAAAAA |
| | | AAAAA |
| 319 | MamR4 | AAATCGAATTCTCTGTCTCCAATTGCTTCTTGCTTTCAAG |
| | | GGACCCAAGCAGGAGGCTGCTCCGCCACATATAAATGT |
| | | AGGACCTGAAGAAGCAGTCTGCAGCTCAAGGCTGGAAT |
| | | TGGCCTAGATCCTCCCTGGAGGCCCAGATTCACAGTGTA |
| | | ATCGTTCCAAGCCATTAATCACAGGCACCCGGCGGGACT |
| | | GTGTCTCGTCCCAAAGGGCATCTCAAGAGGTTTTGCAGA |
| | | GTTTCATGTAAATGATCATTACACTACTAATAAATATGG |
| | | TTAGTGACTTTGAGCCACATCAGGTGCCTTGGGCCAAGG |
| | | AGCTGGCGGAAGGAGTATCTAGGCTTCCTTAAGTGAAG |
| | | GCACTGAACAGCCAGCAGAATTAATCCATCAACTGCTCT |
| | | CCTTTCTTCCCCACTTCTCATACACACACACACGCACAC |
| | | GCGCGCATGTACACACACGCTGGCGAGAGTTTTAGACCA |
| | | GAGCACCAAGCCCTCCAATGCCCATGTTAAGAAAATATG |
| | | AAGTTAATATGCTCGGCTTCCTGTTGAAGTCCGCCTCATT |
| | | CCCACTAACTGATCAGGATACACTCACAGTTCACCCGCA |
| | | AGAGCAGACAACAAATGAGGAGAGATAGGGCAACGGC |
| | | ACCTCTGTCTGCAGCATTTTTAAAAATATAGATACCTAC |
| | | TCTTTCAAACAGATTTGAAGTGAGAATATGGTTTCTATG |
| | | ATAATACCCAAAAATGAACTGCATAAACCATTGCCTAAT |
| | | GCTGAACAGCACTCCTCGATTCTTCCTAAATCTATACTC |
| | | GCAGTTCTTATGCAAGAAAAAGGTAACAACATCCCTGTT |
| | | CTCCATGCTTCCATTTTACTTCACATCTGGACTGTCACTG |
| | | CAAACAGCTGAATCTGATTTTAAAAAGGTACACATATAC |
| | | CACTTTCATTATCAATGTCTTATACAAATTACCTGATACA |
| | | TGTAGTTACTTAGAAATTATTTCCCATTGCTTCAATATCT |
| | | ATGAACAAAAAGTAAACACTACATAAGATAAAATAAAC |
| | | CAAAATATTAATGAGGCTCACAGAACTACTGATGAATA |
| | | AGCTCAGAAAACTGTTAGTATTTTTTATACTATGTGAAA |
| | | CCAAAGACCGATCAAGAAAATGTATTTACTAACTGTATT |
| | | TAATAACCACTGCAATAAGACTGAATGACTTAAGCAAA |
| | | GATAAATTGATAAAAGGGCCGGGCACGGTGGCTCAaaCC |
| | | TATAATCCCAGCACTTTaGAATGGCCaAGGCGGGCaGATC |
| | | ACCTGAGGTCAGGAGTTCaAGACCAGCCTGGCCAACATG |
| | | GTGAAACCCCGTCTCTACTAAAAATACAAAAAAAATTA |
| | | GCCAGGtGTGGTGGCGGTGCaCCTGTAaTCCCAGCTACTT |
| | | CgGGAGGCTGATCAAGTGGCAGGAGAATCACTTGAACCC |
| | | aGGAGGCGGAGGTTGCAGTGAGCCGAGAACTGCACTCC |
| | | AGCCTGGGCAACAAGAGTGAaACTCTGTCTCAAAAAAAA |
| | | AAAAAAAAAAAAAAAActgaagcaatcaaagcggctagtAAAAGAC |
| | | TTACAGAAAAAGTTGATTTGTAATAGAGGGTCAATCTGG |
| | | CACAACTGTAGATTACCTATAAATGTTTAGAATTATCCT |
| | | CTCTTCTAAAATGCAAACAGAATCAGCATGCAAAATAAC |
| | | TTTGGCTTACATGATTCAATTCTAGTCATCTAACAAAAG |
| | | AATTTACTCCAAATCCGGGAAGTTATGGCCAGCCTGGAG |
| | | GGCTAAGAAGAATCTGAAATAGAAAGAAATTTTTATTAT |
| | | TTAAATACTTCCCCTCTCTTCTGCTAAACAATCTCTTTAG |
| | | GCTTGATGGGCAAAAAGGATGTCGCAAGTTTCTACATTC |
| | | TTCTAAAAAACTCAGTACTTTAAAAGCTGATAGAGAAAT |
| | | TCAGTCACCCAAAGGAGTCAGCTGTCACAGAAAATGTTA |
| | | TCTAATAGTGGAAAGATTACATAATGCCGATCTGCACTC |
| | | GTATCTAATAGAGATTTTGAAGAACTAAGGAATTAGGCC |
| | | TCCTAAGATAAAATCTTTGCAGCATGCAATGAGCAAGTA |
| | | TAAAGATCTCATTCTCTTCCCAGGTGACTGGACAAGGGA |
| | | AAGATTCAAGCAAGCCTCTGGGAAGCGGGGAATATTTC |
| | | AAGGAGACTTACTTATTTCAACAAACATTTACTTGGGAC |
| | | TGGACCATCTATGCTGGGCCTAGGACTGTGCTAGGAGCT |
| | | GATGATACATGGATGAACAGGATTAACATCATATAAGA |
| | | AATGATTTGTTCTACGTGGACGTACTGAATCTCTAAGCC |
| | | AACACTAAAATCAAATTTCATATACTGCCAAAAATCACC |
| | | AAGAACTTTAGTGATGATATACAAATGGAGTTTGATATG |
| | | GAAAACTGGAGGCCAATAAAAATGAGGAAAGAACAACT |
| | | TCCTATAACAGATTAGTTCCCTAGTAGGAAAAACCATGT |
| | | TATTAAAGCTCTAAGTTAGGGTAACATTTAGGAGTATCT |
| | | AGGCTTCCTTGAGCCAAAACAGGTTAATCTCATCAGTTT |
| | | TAGATCATAACTTAAGAAAATATGAAGTTAATATGCTTA |
| | | GAAAGTACTAAAACCACACATTAAAAGAGGCAATAAGA |
| | | CCAAGGCAATAAATTTACTTGTAGTACCGGTTCCGAGAC |
| | | ACTTATTTGGTATTAGAAAGCCATCTAATAAAGGTTAAA |
| | | ATATTAGAGAACATAAACTATAAATGTCAATGACACAA |
| | | AATCTAATCTATCATCTTAAAGCTGCAATCGAGAGGATC |
| | | ACTCTTACAAATGATAGAATTAAAAAGAGGGTAATTAG |
| | | CATCAAAAATTCATTTTTTTTCCTGAATTTAAAACTATAG |
| | | GGCTATTTTTACAGCAAATCAAATGTAGAGCGGTGAAAA |
| | | ATAGGCCCCAAAACCGATCnCAGTGTTATGCCAGCAGAA |
| | | CCTGAAGAAACACATCATGGTCCTCTGGTAAGTAAGCTG |
| | | ATGACCTAACAGCAAATTCAGACACAGAAACAAAAGGA |
| | | ACTTTCAGGTGTCTACACACATATCATTAAGAAAGATTA |
| | | TGTGGCAGATGCTACATCACATTTACGTCTCAGGAAAGA |
| | | CCATGTGGCCCAGAGATGAGGGATGGTTTTTATGTCAAT |
| | | TCAAGTAAAAGTGGTTGCCCCTAAAAATAACCACATCTG |
| | | TATACATAAAGAAAGCTTGTCTGATGATACATGCAGAAG |
| | | ATGAGAAAAGGCTTAAGTGGAAAATGAATATAAAATTG |
| | | GATAATGTGTCACCTTGGCTGACATGGATTACACCAACA |
| | | AGCATAGTAATTCTGCTAAGATTACATACCAATAATTAG |
| | | CTTTCCAGTGTGGGACTGATAATGGATTAACATAGTTCC |
| | | ATTAACGTTAACTCAAGATTATTTTAGAAAATAACTGTA |
| | | AACGCCTGCTCAGATTCAGCCATATAACAGGATACTAGC |
| | | AAGTTCTTACTAACAGACCAGACATTCTGCTGCTTGATT |
| | | CATCTTTTAATTTGGTAGAACTTACTAAAATAACCTTTTC |
| | | TCTTAAATGGCACATCCAAAAACCCTCACAGAAAAAAA |
| | | TaTTTAAAAGTATGTAATCCCCAGTGAGATTCAAAATATT |
| | | GTGGAGATAATAACCAAACAGAACAAATGCACCAACCA |
| | | TCTCGGCGATCACAATAAACACAAGATTAAAAATCAAA |
| | | AACATAACTTTGCAGTAACCTTGTGACTAGCTGGTATCA |
| | | GAGCAGCACGCAAATCTGACAGAAAACAGCAATTAAAC |
| | | AAAGGCATTTCTGTCTTGACAACAGACTTCTATAAAACA |
| | | AGGAACTAAGGGCCGTTTTGGTAAGAAATAGAAAGGCC |
| | | AGATTAATCAGAGGAATGAAATTAATATTTA |
| 320 | AluSx | ACAGTGGCACACGCCTGTAGTCCCAGCACCTTTGGAGGC |
| | (SINE/Alu) | TGAGGTGGGTGGATCACCTGAGTCCAGGAGTTCGAGAC |
| | | CAGCCTGGGCAACATGGCATGACCCTGTCTCTGCAAAAA |
| | | ATATGAAAATTAGCCAGGCATGGTGGTGCGTGCCTGTAG |
| | | TCCTAGCTACTTGGGAGGCTGAAATAGGAGGATCGCTTG |
| | | AGCCCAAGAGTTGAAGGTTGCTGTGAGCCAAGATCGCA |
| | | CCACTACAATCCAGCTTGGGTGTCAGAGTAAGACCCTGT |
| | | CTCAAAACAAAAAGATAAAT |
| 321 | MIR | GTATTTAGATTCCCAGACTTTGGAGCCAGATCGGCTGAG |
| | (SINE/MIR) | TTCAAACCCTGTCTGTGCAACTATCAGCTGTTCAGCTGT |
| | | GTGACCTTGGGCAAGTTACTTAACCTCTCTGAACCCTGA |
| | | TTCCTCCTGCAAACGGTGGGAAAAATAATAGAACCAATC |
| | | TCTCTGGGTTGCTGTAAGGATTAAATTAATTTACAGTGC |
| | | ATGTAACATGCTTACAGCAATGTCTGGCACACAGTAAGC |
| | | ACTAAGTATTTGTTGTTATTTGTCATC |
| 322 | L1M1 | AGGATTCATCACCTTCTGACTTAGGAGCTGCTGGTCTCT |
| | (LINE/L1) | GAATAACCTACAGTGGTACCCCAATAACACATCATGAAC |
| | | ATTGGACTCCGAGATGTGCTGGCTTCAGGTGTGACCCAG |
| | | AACATTTCCCACTGTGGTGGGTATAGTGAAAGACACCTT |
| | | CTGTTTGAGCAAAGCAGAGGAAAAAGTAAATGGGATTC |
| | | TGTCTTGCACCTGAGGTACCAGCTTGGCCACAGTGGGGT |
| | | AGAGCACCAAGCAGACTCTTAGGGTCCCTGAGTCAGCAT |
| | | TTCTGGACCTGCCCTGCACCAAAGAGTAAGTCCCAGTTG |
| | | TGGAAGCAGTCATCATAAGCTGACTGAAGAGTGCTTGG |
| | | GTGTTGAGTGAACATCAGTGATAGCCCAGTGGAAACCCC |
| | | TGTGGGCTGGTGGTGGTGGCAGACACATTGTGAGGCTCC |
| | | TCTGCCTGCAGAAAGGGGAGGGAGGAGTGGTAAGGATG |
| | | TTGTCTTGTAATTTGAATGCCAGCTTAGCTGCAGTAGAA |
| | | TAGAACACGAGATAAATAAGGCTTCTGACTTCAATACCT |
| | | GGCTCCCACACAATATCTCTGAACCTACCTGGGGCCAAA |
| | | GGGAACTCACTGCCCTGAGGAGACACAAACCTGGCTGG |
| | | TTACCACCTGCTGATTGTAGAGGCCTAAGGTCTTGAGTA |
| | | AACTTAGGTGGTAGCCAGGCAGTAATTACACTGGGCCTT |
| | | GGGTGACACCCAGTGCTGTGCTCACTTCAAGTCTAAATT |
| | | AGCACAGTCCCAGTGGTGGGGGCAACAGGGAAGCTTAT |
| | | GTCATCCCACCCCAGCTCCAGGTAGCTCAGCATAGAGAA |
| | | AGAAATTCCATTCGTCTGGAAGAAACTAAGGGAAGAGA |
| | | ACAAGAGTCTCTGCTTGGTAATCCAGATAATTCATCGAT |
| | | TTTAACCAAGACCAACCACATGGTACCTCTATGAGTCTG |
| | | CAAGAACAACGTTATTGAGTTTGAGATCCAAGTACCTTC |
| | | AAATTCTGGAAAGCCTTCCCAACAAGGGTGGACACAAA |
| | | GCCCAGACTGCGAAGGCTACAATAAATGCCTAACTCTTC |
| | | AATGCCAAGACACAGATGAACATCTACACATTAAGACC |
| | | ATCCAGTAAAATATGGCCTCACCTAACAAACTGAATAAG |
| | | GCATAAGAGGCCAATCCTGGAGAAACAAAATAAGTAAC |
| | | TTTTCAGACAGATGATTCAACATAGTTGTGTTGAGGAAA |
| | | CAAATTCAAGATAAAATAGAGAAGGAATTCAGATTCTA |
| | | TCAGATAAATCAAACAAAGAGGTTGAAATAATTAAAAG |
| | | GAATCAAGCAGAAATTGAAGTTAAAAAAGCAATTGGCA |
| | | TACTGAAGAATGCATCAGTCTCTTAATAGCAAAACTGAT |
| | | CAGGCAAAAGAAAAAATTATTGAGCTTGAACATAGGCA |
| | | ATTTGAAAATATGTAGAGAAGACAAAAAAGAATGAAGT |
| | | ATGCCTACAAGATTTAGAAAACACCCTGAAAAGGGCAA |
| | | ATCTAAGAGTTGTTAGCCTTAAAGAGAGAAAGAGAAAG |
| | | GGGTAGAAAGTTTCAAGAATACGATCAGAGAACTTCCC |
| | | AAATCTATAAAGATATCAATATCCAAGTACAACCAGGTT |
| | | ACAGAACACAAAGCAGATTGAACCCAAAGACGACTACC |
| | | TCAAGACATTTAATAATCAAACTCCCAAAAATTAAGAAT |
| | | AAAGGATCCTAAAAGCAGCAAGAAAAAAGAAACAGCAT |
| | | ACAATGAAACTCCAGTACGTCTGGCAGCAGATTTTCAGT |
| | | GGAAATCTTACAGGCCAGGAGAGAATAGCATGACATAT |
| | | TTAAAGTGCTGAAGTAGCAAAGCTTTTACACTAGAATAG |
| | | TCTATCCCGTGAAAATATTCCATAGCCATGAAGGAGAAA |
| | | AAAATGACCTTCCCAGACAAACACTGAGAGATTTCATTA |
| | | AAACCAGACCTGTCCTACAAGTAATACTAAGGGGCATTC |
| | | TCTTCCATCTGTAAGAAAAGAATGTTAATGAACAATAAG |
| | | AAGTCATCTGAAGGTACAGAACTCATTGGTAATAGCACA |
| | | GAGAAAAACTGAGTATTATAATATGGTAACTGTGGTGTG |
| | | TAAAATACTCAAGTAGAAATACTCAATGATGACTCAATA |
| | | CAACTACAACAATGTTTCAAGACAAAGACAGTACAATA |
| | | AGACATAAAGAGAACCAACAAAAAGTTGAAAAATGGGG |
| | | AAGCAAAGTTAAAGGTAGAGTTTTTACTAGTTTTCTTATT |
| | | GCTTATTTGTTCACTTAGGCAATCAGTGTGAAGTTGTCA |
| | | GCAGTTAAAACAATAGGTTATAAGATAGTATTTGTAAGT |
| | | TTCATGGTAACCTCAAATAAAAAAACATACAACAGACA |
| | | CAGAAACCAAAAAGCAAGAAATTAAATCATACCACCAA |
| | | GAAAAATCATGTTCACTAAAATGAAGACAGAAAGGAAG |
| | | GACAAAAGAAAGAGAAGATGCAAAAACAAATAACAAA |
| | | ATGGCAGGAGTGAACACATACTTATCAATAATAATGCTG |
| | | AATGGAAATGCACTAAACACTCCAATTAGATGACATAG |
| | | AATGGGTGAAAAAAAGAAAAAGGAAGACCCAATTATCT |
| | | GCTGCCCACAAGAAATACACTTCATCTATAAAGATACAC |
| | | ATAGACTGAAAAATAAAAGAATGGAAAAATGTTCCATG |
| | | CCAATGAAAACAAAAAAAAAGAACCAAAGTAGCTATAC |
| | | TTACATCAGATAAAATATATTTCAAGATAAAAACTGTGA |
| | | AGACAGAACAAATGTCATTTTATGATAAAGGGATCAATT |
| | | CAGTCAGAGAATATAACAATTTTAAATATCCATGCACCC |
| | | TACACTAAAGCACTGAGACATAGAGTATTAGAGCTAAA |
| | | GAGAGAGGCCCCAATACAATAATAATTGAGACTTCAAC |
| | | ACACCACTTTCAGCATTGTACAGATCTTACAGATAGAAA |
| | | ATCATGAAAGAAACATCAGACTTAATCTGTGCTATAAAC |
| | | CAAATATACCTAATAAATATTTGCAGAACATTTTATCTA |
| | | ATGGCTACAGAACACACATTCTTCTCAGCACATAGATAA |
| | | TTTTCAGATACACAACATTTTAGGTTACAAAACAAGTCT |
| | | TAAAACATTCAGAAAAGTGAAATAATATCAAACATCTCT |
| | | GCCCACAATGGAATATAACTAGAAATCAGTAACAAGAA |
| | | TTTTGGAAACTATACAAACAAATGTAAATTAAACAATAC |
| | | GCTCCTCAATGAAAATTGGATCAGTAAAGAAATTAAGA |
| | | ACGAAATTGAAAAATTTCTTCAAACAAATAATGAAAAA |
| | | ACACATACCAAAACCTATGGGATACAGCAAAAGCAGTA |
| | | CTGAGAAATGTATAGATATATGTGCTTACATCAAAAAAG |
| | | AAAAAAATCATATAACCTAATGTTGCATCTTAAAGAAAA |
| | | AACAGCAAAACAAAAATTATAATAAACATCACAGCAGA |
| | | AATAAAATTCAAATAAAAAATACAAAAAAAATCAATGA |
| | | AATGAAAAGTTGATTTTTTTAAGCAGATAAATAAAATTT |
| | | ACAAACCTTTAGCTTGACTAAGAAAAAAAGAAGACCCA |
| | | CATAAAACCAGAGATGAAAAAGGAGACATTATAACTGA |
| | | CACTGCAGAAATTCAAAAGATTATTAGTGGCTATTATTA |
| | | ACAACTGTATGCCAACTAATTGGAAAATCTAACAAAAAT |
| | | GGGTAAGTTCCCAGATATATACAACTTACCAAGATTAAA |
| | | CAACGAAGAAATCCAAAACATGAACAGACCAATAAGAA |
| | | GTAACAAGTTCAAAGCCATAATAAAAAGTCTCCCAGTA |
| | | AAGAAAAGCCCAGGACCTGATGGCTTCACCACTAAATTC |
| | | TACCCAACATTTAAAGATCTAATACCAGCTCTACTCAAA |
| | | AACTTCCAAAACACAGGAGGAAGGAATACTTCCCAACT |
| | | CATTCTTTGAGGCCAGTATTACCATAATACCCAAATCAG |
| | | AAAAAGATACATCAAAAGATGAAAACTGTACGCCAATA |
| | | TCTATAATAAATATTTATGTAAAAATAACAAAGTGTTAG |
| | | CAAACAGAATTCAACAACACATTAAAAGATTGTTCATTA |
| | | TGACAAAGTGGGATTTATCCCAGGGATGCAAGAATGGTT |
| | | CATCATATGCAATCAATCAGTATGATACATCAACAGAAT |
| | | GAAGGACAAAATCATATGATCATTTCAACTGCTGCTGAA |
| | | AAAAGGATTTAATAAAATTCAACATCCTTTGATAATAAA |
| | | AACTCTCAAAAAGCTGGGTATAGAAAGAACATACCTCA |
| | | AAATAATAAAAACCATATATGACAGATCCACAGCTAGT |
| | | ATCATCCTGAATGGAGGAAAAAAATCTGAAAGTCTTTTC |
| | | TCTAAGATCTGGAACATAACAAGGATGTCCACTTTCAAC |
| | | ACTGTTATTCAACATAGTACTGGAAGTGCTAGCTACAGC |
| | | AGCAGTAAAACGAGAAAAAACTAAATGGCATCCAAATT |
| | | GGAAAGGAAGTCGTCAAATTATTCTTGTTTGCAGATGGT |
| | | ACAGTCTTATATTAAGAAAAATCTAAAGACTCCACCAAA |
| | | AAACAGTAAGAACTGATAAAGTTGCAGGATATAAAATG |
| | | AACATACAAACATCAATAGCATTTCTATATGCCAACAGA |
| | | GAATCTGAAAAAAGAGATTAGAAAGTAATTCCATTTAC |
| | | AGTAGCCACAAATAAAATTAAATATCTAGACATTAACTT |
| | | AACCAAAGAAGTGAAAGATCTGTACAATGAAAACTATA |
| | | AAACATGAATGAAAGACATTGAAGAGGATGGCTGGG |
| 323 | LIMEg | CCCTTGAACTTATTAAAATCTTTTATAATGTAGTACATTT |
| | (LINE/L1) | ACTGACTGCTTTCAGGCAGGCATGAGGACCTTTCACTCC |
| | | ATTTGCTCCATTGTCCCTTTTGAAGGATTCTTGTCATATA |
| | | TATAAAACCTCTTAAGACATAATGTTATTGTTTTATATAC |
| | | TCTTTAATCACCTACATCTTTGCACTTTAATATTTCCTAA |
| | | ATTTGCATTCTTCTCTCTGGGACTAGAAGACCTCAGCTTA |
| | | GCGGTTCTTTTCATGTGGGCCTGAGAAATTTTCTCACTTT |
| | | TTGTTTCACTTTCATTCTTGAAGGAACGTTTCACTGGTTA |
| | | TAGGATGCAAGGTTAGCGGTTATTCTCTTCTGCATCTTCC |
| | | CACTGCATTGTCTTCTGAATCTTATAATTTATGTAAAAAC |
| | | ATTAGTTGTCTGTCTTCCCATTGCTTCTGTGAAAATAATG |
| | | CATGTTTTCCTCTGGTTGTTTTTGACATTTTCTTTGTGTCT |
| | | GTTTCTCAGCAATTTTTCCATGATATATGCTCGGAGCGG |
| | | GCTTACTTATCCTACACCCTGAATCTGTAGCTTGACGTCT |
| | | TTTTGTCAACTTTGGAAAGTTTTTGGCATTATCTCATCAA |
| | | ATATTTCCCCTGTCCTGTTCTTGCTCTTCTCTTGCTGGAG |
| | | TGCAGTCGTTCCTGTATTAGACCTTTGCATCATGTTCTAG |
| | | GTATTTTTATCT |
| 324 | AluSx | GCGGTGGCTCACGCCTGTAATCCCAGCACTTTGGGAGGC |
| | (SINE/Alu) | TGAGGCGGGTGGATCACTTGAGGTCAGGAGTTCGAGAC |
| | | CAGCCTGGCCAACATGGAGAAACCCCATCTCTACTAAAA |
| | | ATACAAAAATTAGCTGGGCGTGGTGGCTCATGCCTGTAA |
| | | TCCCAGCTACTTGGGAGGCTGAGACAGGAGAATTGCTTG |
| | | AACCCAGGAGGTGGAGGTTGCAGTGAGCCAAGAACACA |
| | | CTATTGCACTGCAGCCTGGGTGACAGAGCCAGACTCTGC |
| | | CTGAAAAGAAAAGAAAAGAAAAAGAATATG |
| 325 | AluSz6 | TTTTTCTTTGAGGTAGAGTCTCACTCTGTCACCTAGGCTG |
| | (SINE/Alu) | GAGTACAGTGGTGCAATCTCAGCTCACTGCAACCTCTAC |
| | | TTCCCAGGTTCAAGTGATTTTCGTGCCTCAGCCACCCAA |
| | | GTAGCTGGGATTATAGCCATGCGCCACCACACACAGCTA |
| | | ATTTTTTTGTATTTTTTAGTAGAGATGGGGTTCGCCATGT |
| | | TGGCTAGGCTGGTCTCAAACTCCTGGCCTTAAATGATCC |
| | | ACCCACCTCAGCCTCCCAAATTGCTGGGATTGCAAGCAT |
| | | GAGCCATCGCACCTGGCGCAGAAC |
| 326 | ALR/Alpha | TCAACTCACAGAGTTGAACAATCCTTTTCATACAGCAGT |
| | (Satellite/centr) | TTTGAATCTCTCTTTTTGTAGAATCTCCAATGGACATTTG |
| | | GAGCACTTTGGGGCCTTCGCTCGAAACGGGAATATCTTC |
| | | CCATAAAAACTGGACAGAAGCTTTATCAGAAACTACTTT |
| | | GGGATATGTGCTTTCAACTCACATAGTTGAACCCTTCTTT |
| | | TGATAGAGCAGTTTTGAAACACTCTCATTGTAGAATCTG |
| | | CAAGTGGACATCTGGTGTGCTTTGAGGCCTATGGAGAAA |
| | | AAGGAAATATCTTCACATAAAAACTAGACAGAAGCATT |
| | | CTCAGAAACTTATTTTTGATGTGTGTACTCAACTGACTCA |
| | | GTTACACCTTTCTTTTGATAGAGCAGTTTTGAAACACTCT |
| | | TCTTGCAGAATTTATAAGTGGATATTAGGAAAGCTTTGA |
| | | GGCTTTTGTTGGAAACGGGAATGTCTTCACATAAAAACC |
| | | AGACAGAAGCATTCTCAGGAACATCTTTGTTTTACGCGC |
| | | ATTCATCTCACAGACTTGAAACTTTCTTTTGATAGAGCA |
| | | GCTTTGAAACAAACTTTCTGTAAAATTTGCAAGTGGATA |
| | | TTTGGACAGCTTTGAAGCCTTTGCTGGAAACGGGAGTAT |
| | | CTTCACATAAAAACTAGATGGAAGGATTCTCAGACACTT |
| | | CCTTGGGAGGTTTGCATTCAACTCAAAGAGTTGAACATT |
| | | CCTTTTCATAGAGCTGTTTTGAAACACTCTTTTTGTAGAA |
| | | TCTGCTAGTGGACATTTGGAGCAACTTGAGGCCTGTGGT |
| | | GAAAAATGAAATACCTTCGCATAAAAACTAGACAGAAT |
| | | CATTCTCAGAAACTTCTTTGTGATGTGTGTACTCCACTCA |
| | | CAGAGTTGAACATTTCTTTTGATAGAACAGTTTTGAAAC |
| | | ACTCCCTTGTAGAATCTGCAGGTGTATATTTGGACAGCT |
| | | TTGAGTCTTTCATTGGAAACGGGAATATCTTCTCATAAA |
| | | AACTAGACAGAAGCACTCTCAGAAACTTCTCTGTGATGT |
| | | TTGCCTTCAACTCTCAGAGTTGATCATTCTTTTTCATAGA |
| | | GCAGTTTTGAAACACTCTTTTTGTAGAATCTGCAAGCGG |
| | | ACATTTGGAGCACTTTGAGGCCTGTGGTAAAAAAGGAA |
| | | ATATCTTCACATGAAAACTAGACAGGAGCATTCTAAGAA |
| | | ACTTATTTGTGATGTGTACACTAAACTCACAGAGTTGAA |
| | | CTTTTCATTTGATAGAGCAGTTTTGAAACACTATTTTTGT |
| | | GAATCCTGCAAGTGGACATTTGGAGCACTTTGAGGTATT |
| | | CTTTGGAAACGGGAATATCTTCACATAAAAACTAGAAG |
| | | GAAGCATTCTCAGAAACTTCTTTGTGAGGTTTGCATTCA |
| | | ACTCACAGAGTTGAACTTTTCTTTTGATAAAGCAGTTTTG |
| | | AAACACACTCTGTAGAATCTGTTAATGGATATTTGGACA |
| | | GCTTTGAGGTTTTCGTTGGAAACGGGACTATCTTCACAT |
| | | AAAAACTAGACAGAAGCATTCTCAGAAACTTCTTTGCGA |
| | | TGTTTGCATTCAACTCACAGAGTTGAAGATTCCTTTTCAT |
| | | AGAGCAGTTTTGATATGCTCTTTTTGTGGAATCTGCCTGA |
| | | GGACATTCGGAGTGCTTTGAGGCCTAAGGTGAAAAAGG |
| | | AAATATCTTCACATAAAAACTAGACAGAAGCATTCTCAG |
| | | AAACTTCTTTGTGAAGTGTGTACTCAACTCACAGAGTTA |
| | | AACCTTTCTTTGATAGAGCAGTCTTGAAACACACTTCTT |
| | | GTAGAATTTACAAGTGGATATTAAGACAGCTTTCAGGCT |
| | | TCCATTGGAAATCCTGAAGATATTCGCTGGAATATCTTC |
| | | ACATAAATTGTAGACAGAAGCATTCTCAGAAACATCTTT |
| | | GTGATGTGTGCTGTTGGAACTTTCCTTTGATAGAGCAGT |
| | | TTTGAAACACTCTTTTTGTAGAATTTGCAAGTGGATATTT |
| | | GGACAGCTTTGAAGCCTTCCCAGGAAATGAGTTTATCTT |
| | | CACATAAAAACTAGACAGAATCATTCTCAGAAACTTCTT |
| | | TGTGATGTTTGGTTTAACTCACAGAGTTGAACATTCCTTT |
| | | TCATAGAGCAGTTTTGAAAAACGCTTTTTGTAGAATCTG |
| | | CAAGTGGACATTTGCAGCGTTTTGGGACCCATAGTGAAT |
| | | AAGGAAAGATGTTCACATTAAAACTAGATAGAAGCATT |
| | | CTCAGAAACTTCTTTGTGATGTGTGTACTCAACACACAG |
| | | AGTTGAATCTTTGTTTTGACAGAGCAGTTTGAAACCCTTT |
| | | TTTGTATAATCTGCAAGTGGATATTTGGATAGCTTTGAG |
| | | GCTTCCGTCGGAAACGGGAATATCTTCACATAAAAACTA |
| | | GAGAGAAGCATTCCTCAGAAACTTCTTTGTGAAGTTTGC |
| | | CTTCAACTCACAGAGTTGAACATTCCTTTTCATAGAGCA |
| | | GTTTTGAAACACTCTTTTTGTAGAATCTGCAA |
| 327 | L1P1 | CAGGCCTGAGCAATGGCGGGCACCCCTCCCCCAGCCTCG |
| | (LINE/L1) | CTGCCGCCTTGCAGTTTGATCTCAGACTGCTGTGCTAGC |
| | | AATGAGCGAGGCTTCATGGGCATGGTACCCTCCGAGCCA |
| | | GGTGCGGGTTATAATCTCCTGGTGTGCCGTTTGCCAAGA |
| | | CCATTGGAAAAGTGCAGTATTAGGGTGGGAGTGACCCG |
| | | ATTTTCCAGGTGCTGTCTGTCACCCCTTTCTTTGACTAGG |
| | | AAAGGAAATTCCCTGACCCCTTGTACTTCCCAGGTGAGG |
| | | CGATGCCTCGCCCTGCTTCGGCTCATGCTCG |
| 328 | THE1B | CACCCAAGTCACCTCTTGAATGCTTTGCTGCTTAGACATT |
| | (LTR/ERVL-MaLR) | TCTTCTGCCAGATACCCTAAATAATCTCTCTCAAGTTCAA |
| | | AGTTCCACAAATCTCTAGGGCAGGGGCAAAATGCCACC |
| | | AGTCTGTTTGCTAAAACATAACAAGAGTCATCTTTGCTC |
| | | CAGTTCCCAACAAATTCCTTATCTCCATCTGAGACCACC |
| | | TTATCCTGGATTTCATTGTCCATATCATTATCAGCATTTT |
| | | GGTCAAAGCCACTCCACAAGTCCCTAGGAAGTTCCAAAC |
| | | TTTCCCACATTTTCCTGTCTTCTTCTGAGGCCTCCAACCT |
| | | ATTCCACCCTCTGTCTGTTACCCAGTTCCAAAGTTGCTTC |
| | | TACATTTTCAGGTGTCTTTTCAGCAGTGCCACACTCTACT |
| | | GGTACTAATTTAC |
| 329 | AluSg | AGGCCTGGCACAGTGGCTCATGCGTGTAATCCCAACACT |
| | (SINE/Alu) | GCGGGAAGCTGAGGCAGGAGGATCACTTGAGCCCAGGA |
| | | GCTCATGGCTGTAGTGAGCTGTGATTGCACCACTGCACT |
| | | GCACTCCAGCCTGGGCAACAGCAAGACCCTGTCTCCAAA |
| | | AAAAAAAAACAAAACAAATTAAT |
| 330 | HERV9N-int | TTATGGTGGACATCATTGAATAATTCATGGGCTTTTTCCT |
| | (LTR/ERV1) | AATTCTCCTTAGTCCTTCTAGAACACAGGTCAACAGATG |
| | | TTTGTGACTCCAGTCCCTATGATCTGAGTTGAGGTCCCA |
| | | GTGGGGATCCATACTGGGGACAGCTTGCTGACCAGTAG |
| | | GGAATTTTCCCTTTCTTTGGCTGTCATTTTATCATTTACTT |
| | | GACTAAGATGCCAGGTATCTCCAAACTCTTGGGCTGCAG |
| | | CTAAAGCTGCATTCTTTTCATTAAAGGCCAGGGTTTGAT |
| | | CTAACAAAAGCATGACATCTTTCCAAGTGAGATCGAAG |
| | | GTTTCCCCTAGACCCTGTAGGACATCTATGTACCTATCA |
| | | GGATCATCTGAAAACTTTCCCAGGTCTGCCTTGATCTGC |
| | | TTTAAATCAGAGAGGGAGAAGGGGACATGTACCTGGGT |
| | | TGGGCCAAATTCCCCTTCCCCTACAGCTTGAAGGGGACG |
| | | TAACCGATAGCCCGGGGGTTTTTGTGGTCCTTTGGAGAT |
| | | TTCTTTGCTTATTTCCTTCTGGGCAGGGGAGATTAGAGG |
| | | AGGCTTATCATTAATAGGAGGGGGAGCCATAGGGAGGC |
| | | TAGGATATGGGACTAAGCTGAAAGGTCCTCCTGGGGGA |
| | | TGTAAATTGCAAGCTTTGCATAGTCATGTATTCTCCTTCA |
| | | ATGAAAAGAGTTTGGACATAAGGTATTTCACTCCATTTG |
| | | CCTTCCCTCTTACAGAAAAGGTCAAGCTGCAGGATAGTA |
| | | TTGTAATTTATACTTCCCTCAGGTGGCCATTTTTCCCCAT |
| | | CAGAGAGAGAATATTGGGGCCAGGCTGTAGGGCAGAAA |
| | | AAAATGAGCCGCCTCTTTTTCAGGGTTTGTGGGTCAAAT |
| | | TGGTCCCAATGGCTTAGGATGCATTTCAAAGGTGAGCCT |
| | | GTTGATGCCTGAGTGTTTCCCATCTGAAAGACAAAACCA |
| | | CCTGTGGTTTTGGTTTGTTTTGTTTCTCCCCCACCCACAA |
| | | ACCTGCAACGGTCCCTGGACCCTGCTGATCGGAATAGTT |
| | | GTGCTCCCTGACGCAGCAGCAAAAATACTAGTTTTCCTC |
| | | CCAGACCACAAGGGGGACTGAGAAAGGTCGGATTTAGT |
| | | GGCCCTTACCAACGCATTCTCGAAAACCTGCACCCTTGC |
| | | CTGTCCTCCTAGACCACAAAGAGGACCGAGAAAAATCG |
| | | GATTTAGTGGCCCTTACCGACACATTCTCGAAAACCCAT |
| | | TAGAGTCCTAAGCATTCACCTGTTAGTATTGGGACCTTA |
| | | ACCATGTCCTATAAAGATGTTATGCCCCCCAAATGAAGT |
| | | GGAGTGCCATACCCTGAGGGAGGGAAGGGATGTCCAGG |
| | | GTTGGAAGAGTGACACCTTTTGTCCTTACTTATATGAAT |
| | | AGGAAGGATACAATTTCTGAGGCTCCCCATATTCTAGCT |
| | | TCAGGAATAGCTTTTGTTAGGCCTGCTAGTCTGAGGAGG |
| | | GATCCTAAAATTCCAGATAGTCCCCCCTACGATGGGGCT |
| | | TTGGGCAAAAATTACGTCTTTCTGATTGGTGAGCCTGGG |
| | | TGCCTACAGAAGGTAACAGAATCCCAAATTTATACTAGA |
| | | AATCATTCTTATAGGAGAAACTAGAAAAGCACCAGAGA |
| | | CAGGGAGTGGTTTTTAGAAGCAGGACTAGCCTGGAGAA |
| | | GAGAGGCAAGGGGAAGTTTGTCTGGCAGGCGTTAGGAC |
| | | CCAGGGGGCAATGGTCAGGGTAGATAGAATAGATGGGC |
| | | AAGTCTCGCTTGGGCGACATGACTTTGAGAGTTCCACTC |
| | | ATGGCCACAGGGTCAACCAACTTGTTGTTGGGACCCCGG |
| | | AGCTGAATGGCTTTCCTCTCTGTCGACCCTGGGCTCAGC |
| | | CCAGAAGTACAGGAAAAGCGGAAGCTGGTTCCAGGCAA |
| | | ACCAACGCTACCAACTCTGAAGAGTCAGGGATTGTTAGA |
| | | AAGGCCTTTCCCAGAAAGCCTGACACCTGTGTCTTTAGT |
| | | CTGGCAGCTGCGCTAGTAGCTTTTAACTGGCCGACAGGT |
| | | GCCTGGTATTTAGCCCCCGAATTCTAAGGAAAAATAGGA |
| | | AAGAATAGCAAGCGAAAGGGGTCCGATGGTACTCACCA |
| | | CTTGGCAATAGGCGATAGTCTCACTTCTTGGCGATAGGC |
| | | GATGGTCCCATCTGGGTCGCCAAAA |
| 331 | HERV17-int | CTTTAACCTCCTTGTTACGTTTGTCTCTTCCAGAATCGAA |
| | (LTR/ERV1) | GCTGTAAAACTACAAATGGTTCTTCAAATGGAGCCCCAG |
| | | ATGCAGTCCATGACTAAGATCTACCGCGGACCCCTGGAC |
| | | TGGCCTGCTAGCCCATGCTCCAATGTTGATGACATTGAA |
| | | GGCACCCCTCCCAAGGAAATCTCAACTGCACGACCCCTA |
| | | CTATGCCCCAATTCAGCATGAAGCAGTTAAGAGCGGTTG |
| | | TCAGCCAACCTCCCCAACAGCACTTGGGTTTTCCTGTTG |
| | | AGAGGTGGGACTGAGAGA |
| 332 | LTR81B | CAGTCTTTCAGGACCAGAAGAGATGGATTTTAGGTTTTC |
| | (LTR/Gypsy) | CTTCCACTCAATGTATTCTATATGTACCCTAATCAACAA |
| | | ACATGCCTGGTTGTCACAGGTAGAAGGGGTCTCTACTCT |
| | | GAATCATTCAGAGAAGAAATAATCATATTCTTTCGATGC |
| | | TATCACTAACACAGGACCGTGATCCGAGACAACCAGGTT |
| | | CAGTTCTTGATATGTAAAGGAATTTGGGAAAATATCATC |
| | | TCTCACCACAAAATCTGTATTTTTATGTATATTTAAGCAA |
| | | AATCCTGTTTTGGTCATCATTTTCTTTACCTTTCTTCTATA |
| | | TCCATCCTAATCTCCCTTTCAGC |
| 333 | ALR/Alpha | CCTATGTTAGAATAGAAAATGTCTTCACATAAAATCTAG |
| | (Satellite/centr) | ACAGAAGCAATCTGAGATACTTCTTTGTGGTGTGTCCTT |
| | | TCATCTCAAAGAGTTAAAACTTTCTTTTGATTGAGCAGTT |
| | | TTCAAACTCTCTTTTTGTAGAATCTGCAAGTGGACATTTG |
| | | GAGCGCTTTAAGGCCTGTGGTGGAAAAGGAAATATCTTC |
| | | ACCTAAAAACTAGACAGAAGCAATCTGAGAAACTTCTTT |
| | | GTGATGTGTGAATTCATTTCACAGAGTAAAACCTTTCTTT |
| | | TGATGGAGCCGTTTTGAAACTCTCTTTTTGTAGAATCTGC |
| | | AAATGGACATTTGGAGTTCTTTGAGGCCTATGGTGGAAA |
| | | AGGAAATATCTTCACATAAAAACTAGATAGAAG |
| 334 | ALR/Alpha | TCATCTCACAGAGTTAAACCTTTCTTTTGATTGAGCAGTT |
| | (Satellite/centr) | TTGAAACTCTCTTTTTGTAGAATCTACAAGTGGACATTG |
| | | GGAGCTCTTTGAGGCCTATGTTAGAAAAGGAAATATCTT |
| | | CACATAAAACCTAGATAGAGGCAATCTGAGAAACATCT |
| | | TTGTGATGTGTGCATTCATCTCACGGAGTTAAACCTTTCT |
| | | TTTCGTTGAGCAGTTTTTAAACTGTCTTTTTGTAGAATGT |
| | | GCAAGTGGACATTTGGAGCGCTTTTTGTCCTATGGTGGG |
| | | AAAGGAAGTATCTTCACATAAAAACTAGACCGAAGAAT |
| | | TCTGAGAAACTTCTTTGTGACGTGTACGTTCATCTCACTG |
| | | AGTTGAACCTTTCTTTTGATTGAGCAGTTTGGAAACACT |
| | | CTTTTTGTAGAATCTGCAAGTAGACATTTGGAGCGCTTTT |
| | | CAGCCTACGGTAGAAAAGGAAATATCTTCACATCACAA |
| | | AGAGAGAGTTTCAAAACTGCTCTATCAAAAGAAAGGTTT |
| | | AACCCTGTGCGATGAATGCACATATCACAAAGAAGTTTC |
| | | TCAGATTGCTTCTGTCTAGATTTTATGTGAAGATATTCCT |
| | | TTTTCCACCATAGGCCTCAAAGCGCTCCAAATGTCCACT |
| | | TGCAGATTCTACAAAAAGAGTGCTTCCAAACTGCTCGAT |
| | | GAAAAAAATGGTTCAACTCTGTGAGATGAATGCACGCA |
| | | TCACAAAGAAGTTTCTCAGAATTTTTCTATCTAGTATTTA |
| | | TTTGAAGATATTTCATTTTCCACCAT |
| 335 | AluSc8 | TTTCAGATAGAGTCACCCTCTGTCGCCCAGGCTGGAGTG |
| | (SINE/Alu) | CAGTGGCATGATCTTGGCTCACTGCAACCTCCACCTCCC |
| | | AGGTTCAAGCGATTCTCCTGCCTCAGCCTCCTGAGTAGC |
| | | TGGGATTACAGA |
| 336 | LIP3 | GAACTAATTTACACTCCCACCAACAGTGTAAAAGTGTTC |
| | (LINE/L1) | CTATTTTTCCACAACCTCTCCAGCATCTGTTGTTTCCTGA |
| | | CATTTTAATGATTGCCATTCTAACTGGCATGAGATGGTC |
| | | TCATTGTGGTTTTCATTTGCATTTCTCTAATGACCAGTGA |
| | | TGATAAGCATTTTTTCATACATCTCTTGGCTGCGTAAATG |
| | | TCTTCTTTTGAAAAGTGTCTGTTCATATCCTTTGCCCATT |
| | | TTTTGATGGGGTTGTTGCCTTTTTTCTTGTAAATTTCTTTC |
| | | AGTTCTTTGTAGCTTCTGGATATTAGCCCTTTGTCAGATG |
| | | GACAGATTGCAAAAATCTTCTCCCATTCTGTAGGTTGCC |
| | | TGTTCACTCTGATGATGATGATAGTTTCTTTCGCTGTGCA |
| | | GAAGCTCTTTAGTTTAATTAGATCCCATTTGTCAATTTTA |
| | | ACTTTTTTTGCCATTGTTTTTGGTGTTTTAGACATGAAGC |
| | | CTTTTCCCATGCCTATGTCCTGAATGGTATTGTCTAGGTT |
| | | TTCTTCTAGGATTTTTATGGTCCTAGGTCTTATGTTTAAG |
| | | TCTTTGATCAATCTTCAGTTGATTTTTGTATAATGTGTAA |
| | | GGAAGGGGTCCAGTTTCAGTTTTCTGCATATGGCCAGCC |
| | | AGCTTTCCCAACACCATTTATTAAATAGGGAATCCTTTC |
| | | CCCATTTCTTGTGTGTGTCAGGTTTGTCAAAGATCAGAT |
| | | GGCAGTAAATGTGTGGTGTTATTTCTGAGGCCTCTGTTCT |
| | | GTTCCATTGGTCTATATATCTGTTTTGATACCAGTGCCAT |
| | | GCTGTTTTGGTTACTGTAGACTTGTAGTATAGTTTGAAGT |
| | | CAGGTAGCATGATGCCTCCAGCTTTGTTCTTCTTGCCCAG |
| | | GATTTTCTTGGCTATGTGGGCTTTTTTTTGGTTCCATATG |
| | | AAGTTTAAAATAGTTTTTTCCAATTCTGTGAAGAAAGTC |
| | | AGTGGTAGCTGGATGGGGAGAGCATTGAATCTATAAATT |
| | | ACTTTGGGCAGTAAGGCCATTTTCATGATACTGATTCTTC |
| | | CTATCCATGAGCATGCAAGGTTTTTCCATTTGTTTGTGTC |
| | | CTCTTTTATTTCCTTGAGCAGTGGTTTTTGAAGAGGTCCT |
| | | TCATATCCCTTGTAAGTTGTATTCCTAGGTATTTTATTCT |
| | | CTTTGTAGCAATTGTGAATGAGAGTTCACTCATGATTTG |
| | | GCTCTCTGTTGTCTGTTATTGGTGTATAGGAATGCTTGTC |
| | | ATTTTCGCACATTGATTTTGTATCCTGAGACTTTGCTGAA |
| | | GTTGCTTATCAGCTTAAGGAGGTTTTGGGCTGAGACAAT |
| | | GAGGTTTCCTAAATATACAATCATGTCATCTGCAAACAG |
| | | AGACAATTTGACTTCCTCTCTTCCTATCTGAATACCCTGT |
| | | ATTTCTTTCTCTTGCCTGATTGCCCTGGCCAGAACTTCCA |
| | | ATACTATGTTGAATAGGAGTGGTAAGAGAGGGCATCCTT |
| | | GCCTTGTGCTGGTTTTCAAAGGGAATGCTTCCAGTTTTTT |
| | | CCCCCATTCAGTATGATACTGGCTGTGGGTTTGTCATAA |
| | | AGAGCTCTTATTATTTTGAGATATGTTCCATCAATACCTA |
| | | GTTTATTGAGAGTTT |
| 337 | AluYc3 | GCGGTGGCTCACGCTTGTAATCCCAGCACTTTGGGAGGC |
| | (SINE/Alu) | CGAGGTGGGCGGATCACGAGGTCAGGAGATCAAGACCA |
| | | CGGTGAAACCCCATCTCTACTAAAAATATAAAAAATTAG |
| | | CCGGGCGTGGTGGTGGGCGCCTGTAATCCCAGCTACTCA |
| | | GAGAGGCTGAGGCAGGAGAAGGGCGTGAACCCGGGAG |
| | | GCGGAGCTTGTAGTGAGCTGAGATCGCGCCACTGCACTC |
| | | CAGCACCCCAGCCTGGGTGACAGAGCGAGACTCCGTCTC |
| | | AAAAAAATAATAATAATAATTAAATAAATAA |
| 338 | LIPA10 | CCAAGAAGTTCAAACTGGACAGAACCCACCACAGCTCC |
| | (LINE/L1) | ACAAAGCCACTGTAGCCAGACTGCCTCTCTACATTCCTC |
| | | CTCTCTGGGCAGGCCACCTCTGAAAGAAAGGCAGCAGC |
| | | CCCAGTCAGGGGCTTATAGATAAAACTCCCATCTCCCCG |
| | | GGACAGAGCACTTGGGGGAAGGGGCATCTGTGGGTGCA |
| | | GCTTCAGCAGACTTAAACGTTCCTGTCTGCTGGCTCTGA |
| | | AGAGAGCAGCAGATCTCCCAGCACAGCACTCCAGCTCTC |
| | | CTAAGGGACAGACTGCCTCCTCAAGTGTGTCCCTGAACC |
| | | CTGTGCCTCCTGACTGGGAGACACCTCCCAGCAGGGATC |
| | | GACAGACACCTCATACAGGAGAGCTCTGGCTGGCATTTG |
| | | GCGGGTGCCCCTCTGGGACAAAGCTTCCAGAGGAAAGA |
| | | ACAGGCAGCAATCTTTGCTGTTCTCAGCCTCTGCTGGTG |
| | | ATACCCATTTAAACACAGTCTGGAGGGGGCCTCCAGCAA |
| | | ACTCCAGCAGACCTGCAGAGGAGAGGCCTGACTGTTAG |
| | | AAGGAAAACTAACAAACAGAAAGGAATAGCATCAACAT |
| | | CCACAAAAAGGACATCCACACAAAAACCCCATCCAAAG |
| | | GTCACCAACATCAAAGACCAAAGATAGATAAATCCATG |
| | | AAGATGAGGAAAAAACAGCGCAAAAGGGCTGAAAATTC |
| | | CAAAAACCAGAATGCCTCTACTCCTCCCAAGGATCACAA |
| | | CTCCATGCCAGCAAGGGAACAAAACTGGACGGAGAATG |
| | | AATTTGACCAACTGACAGAAGTAGGTTTCAGAAGGTGG |
| | | GTAACAACAAACCCCTCTGAGCTAAAGGAGCATGGTCT |
| | | AAGCCATTGCAAGGAAGCTAAGAACCTTGAAAAAAGAT |
| | | TAGAGGAATTGCTATCTAGAATAACCAATTTAGAGAAG |
| | | AATATAAATGATCTGATGGAGCTGAAAAACACAGCTTG |
| | | AGAACTTTGTGAGGCATACACAAGATTCAATAGCCAAAT |
| | | CGATCAAGCAGAAGAAAGGATATGAGAATTGAAGTTCA |
| | | ACTTAATGAAATAAAATCTGAACATTAAAGTAGAGATA |
| | | AAAGAATGAAAAGGAACAAACAAAGCCTCCAAGAAATA |
| | | TGGGACAATGTGAAAAGACCAAACCTACGTTTCAATGGT |
| | | GTACCTGAAAGTCATGAAGAGAATGGAACCAAGTTGGA |
| | | AAACACTCTTCAGGATATTATCCAGGAAAACTTCCCCAA |
| | | CCTAGCAAGAGAGCCCAACACTAAAATTCAGGATACAC |
| | | AGAGAACACTACAAAGATACTCCTCAAGAAGACCAACC |
| | | CCAAGACACATAATCATCAGATTCACCAAGGTTGAAAG |
| | | GAAGGAAAAAATGTTAAGAGCAGCCAGAGAAAAGGGTC |
| | | AGGTTACCCACAATAGGAAACCCATCAGACTAACAGCT |
| | | GATCTCTCTGCAGAAAACCTACAAGCCAGAAGAGAGTA |
| | | GGGCCAATACTCAACATTCTTAAACAAAAGAATTTTTAA |
| | | CCCAAAATTTCATATCCAGTCAAACTAAGCTTCATAAGC |
| | | AAAGGAGAAATAAAATCTCTTATGGACAAGCAAATGCT |
| | | GAGAGATTTTGTCACCATCAGGCCTGCCTTACAAGAGCT |
| | | CCTGAGGAAGCACTAAATATAAAAAGGAAAAACTGGTA |
| | | CCAACCACTGCAAAAACATACCAAATTGTAAAGACCAT |
| | | CAACACCATGAAGAAATGGCATCAAATAAAGGGCAAAA |
| | | TAACCAACTAACATCATAATGACAGGATCAAATTCACAC |
| | | ATAACAATATTAACCTTAAATGTAAATGGGCTAAATGCC |
| | | CCAATTAAAAAACACAGACTGGCAAATTGGAAAGAGTC |
| | | AAGACAAATTG |
| 339 | AluSz | TTTTTTTTTTCCCAGACAGAGGCTCACTCTGTTGCCCAGG |
| | (SINE/Alu) | CTGGAGTGCAGTGGCATGATCTCGGCTCATTGCAACCTC |
| | | TGCCTTCTAGATTCAAGGGATTCTCCTGCCTCAGCCTCCC |
| | | AAGTAGCTGGGATTACAGGCCCACACCACCACGCCTGG |
| | | CTAATTTTTGTATTTTGAGTAGAGACGGCGTTTCATCATG |
| | | TTGGCTAGGCGGGTCTCGAATTCCTGACCTCAAGTGATC |
| | | TGCCCGTCTCCGTCTACCAAAGTGCTGGGATTACAGGCG |
| | | TGAGCCACCACGCCCGGCCTGAAGCC |
| 340 | REP522 | TAGATGGAGGGGGAAAAACAGGGTGGGGAGCGGGAGG |
| | | GAGGGAAGGTTTTGCAGAAAGACGGCGGTTAAAAAGTT |
| | | TATGGGTAGATGGAGGGGGAAAAGAGGGTGGCAAGTGG |
| | | GAGGAGGAAAGAGGGTGATAAGGGGGGGAAGTGGGGG |
| | | TGAGCAGTAGGGAGAGAAGGTTTTGTGAAAAAAATGGG |
| | | GAGAAAGGTTTTGGTTAGACGGGAGAAAAGAGGGTAAC |
| | | AAGTTGGGGAAGGAAAAAGAGGGTAGCTAGGAAGAAG |
| | | ACAAGGTTTTGCGAAAAGATAGCGGCCAGAAAAGAAAG |
| | | ACGGTGGAGAAAGGAAAGACGGTGGGTAAAAAGTGGGT |
| | | AGATGGAGTGGGGAAAGAGGGT |
| 341 | AluSc8 | TTTCAGATAGAGTCACCCTCTGTCGCCCAGGCTGGAGTG |
| | (SINE/Alu) | CAGTGGCATGATCTTGGCTCACTGCAACCTCCACCTCCC |
| | | AGGTTCAAGCGATTCTCCTGCCTCAGCCTCCTGAGTAGC |
| | | TGGGATTACAGA |
| 342 | L1P3 | ATTCAGAAGACAAATCTCACATGCAAAGACACACATAG |
| | (LINE/L1) | GCTCAAAATAAGTGGATGGAGGAATATTTACCAAGCAA |
| | | ATGGCAAGCAAAAAGAAAAAGCAGGGGTTGCAATCCTA |
| | | GTATCTGATAAAACAGGCTTTAAACCAAGAAAGATCAA |
| | | AAAAGACAAAGAAGGTCATTACATAATGGTAAAGGGAT |
| | | CAATGCAACAAGAAGAGCTAACTATCCTAAATATATAC |
| | | GCACCCAATACAGGAGCACCCAGATTCATAAAGTAAAT |
| | | TCTTAGAGACTACAAAGAGACTTATACTCCCATACAATA |
| | | ATAGTGGGAGATTTTAACACCTCATTGTTGATATTAGAT |
| | | CAATGAGACAGAAAATTAACAAGGATATTCAGGACTTG |
| | | AACTCAGCACTGGACAAAGCAGATTTAATAGACATCTAC |
| | | AGAACTCTCTACCTCAGATCAACAGAATATACATTCTTC |
| | | TCAGCACCACATAGCACTTATTCTAAAATTGACCACATA |
| | | ATTGGAAGTAAAACACTCCTCAACGAATGCAAAAGAAT |
| | | GGAAATCATAACAAACAGTCTCTCAGACCACAGTGCAA |
| | | TCAAATTAGAACTCAGGATTACGAAACTTACTCAAAACT |
| | | GCACAACTACATGGAAACTGAACAACCTGCTCCTGAAC |
| | | GACTACTGGGTAAATAATGAAATGAAGGCAGAAATAAA |
| | | TAAGTTTTTGAAACCAATGAGAACAAAGACACAACATA |
| | | CCAGAATCTCTGGGACACAGCTAAAACAGTG |
| 343 | L2a | TATTTTTAAGCAAAGACTTAGAGAGAGAGAGGAAGTTA |
| | (LINE/L2) | GCTATGCACATTGTGGGTGCGGTGTGGTTAGGGTGGCCC |
| | | TGAGATAGGGATATGCCTGGTGTGTTTACGGAACAGCTA |
| | | AGAGGCCAGGGAACTAGAGGAAATTGAGTGGGAAGGA |
| | | GAAGAGTAGGAGATTAGTTTTGAAAAGCAAATGGTTTG |
| | | GGAATATGGATCATGTAAGAGCACATGAGATTTTATAAG |
| | | GATTTCATTTTACTCAGGGTGAAATGAAGAAGCACTAAA |
| | | A |
| 344 | AluJb | GTTCATGCCTGTAATCCCAGTGCTTAGGGAGGCCGAGGT |
| | (SINE/Alu) | GGGTGGATTGCTTGAGCCCAGGAGTTCGAGACCAGCCTG |
| | | GACAAAATGGCAGAAACTCCATGTCTACAAAAAATACA |
| | | AAAATTAGCCGGGCATGATGTTCTGCGCCTGTAGTCCCA |
| | | GCTACTCAGGAGGCTGAGGTGGGAGGATCGCTTGAGCC |
| | | CGGGAGGCGGAGTTTGCAGTGAGCTGAGATGTCACTGC |
| | | ATTCCAGCCTGGCAGACAGAGCCAGACTCTGTCTCAAAA |
| | | GAAAAAAAGAAAAA |
| 345 | LIPA7 | ATGGAATACTATGTAGCCCTAAAAAAAGATGAGTTCATG |
| | (LINE/L1) | TCCTTTGCAGGGACATGGATGAAGCTGGAAACCATCATT |
| | | CTCAGCAAACTAACACAGGAACAGAAATCCAAACACTG |
| | | CATGTTCTCACTCATAAGTGGGAGTTGAGCAATGAGAAA |
| | | ACATGGACACAGGGAGGGGAACATCACACACTGGGGCC |
| | | TTTTGGGGAGTTGGGGGCTAGGGGAGGGATAACATTAG |
| | | GAGAAATACCTAATGTTATTTCTCCTAATATTATTTCAGC |
| | | CTAATGATGGGTTGATGGGTGCAGCAAACCAGCATGGC |
| | | CCATGTATACCTATGTAACAAACCTGCATGTTCTACATA |
| | | TGTATCACAGAACTTAAAGTATGTATATATAAAAAA |
| 346 | LIPA10 | TTAGTCTGATGGGCTTCCCTTTGTGGGTTACCTGACCTTT |
| | (LINE/L1) | CTCTCTGGCTGCCCTTAACATTTTTTCCTTCATTTCAACTT |
| | | TGGTCAGTCTGACGATTATGTGTCTTGGGGTTGCTCTTCT |
| | | CAAGGAGTATTAGTGGTGTTCTCTGTATTTCCTGAATTTG |
| | | AATATTGGCCTGTCTTGCTACGTTGGGGAGGTCCTCTGG |
| | | ATAATATCCTGAAGAGTGTTTTCCAACTTGATTCCATTCT |
| | | TCCCGTCACTTTCAGGTACACCAATCAGACGTAAGTTTG |
| | | GTCTTTTCACATAGTCCCATATTTCTTGGAGTCCTTGTTC |
| | | ATTCTTTTTCATTCTTTTTATCCCTAATCTTGTCCTGATGC |
| | | TTTATTTCATTAAGTTGATCTTCAATCTCTGATATCCTTT |
| | | CTTCCGCTTGATCGATTCGGCTATTAATACTTGTGTATGC |
| | | TTCACGAAGTTCTCATGCTATGTTTTTCAGCTCCACCAGC |
| | | TCATTTATGTTCTTCTCTAAACTGGTTACTCTAGTTAGCA |
| | | ATTCCTCTAACCTTTTTTCAAGGTTCTTAGCTTCCTTGCA |
| | | TTGGATTAGAACATGCCCCTTTAGCTCAGAGGAGTTTGT |
| | | TATTACCCACCTTCTGAAGCCTACTTCTGTCAATTTGTCA |
| | | AACTCATTCTCTGTCCAGTTTTGTTCCCTTGCTGGCAAGG |
| | | AGTTGTGATCCTTTGTAGAGGAGGTATTCTATTTTTTGGA |
| | | ATTTTCAGCTATTTTGCCCTGGTTTTTCCTCATCTTTGTGG |
| | | ATTTATCTACTTTTGGTCTTTGATGCTGGTGACCTTCGGA |
| | | TGGGGTTTTTGTGTGTGTGTCCCTTTTGTTGATGTTGATG |
| | | CTATTCCTTTCTGTTTGTTAGTTTTCCTTCTAACTGGCCCG |
| | | TCTGGTGCAGGTCTGCTGGAGTTTTCTGGAGGCCCACTC |
| | | CAGACCCTGTTTGCCTGAGTATCACCAGCGGAGCCTGCA |
| | | GGACAGCAAAGATTGCTGCTTGTTCCTTTCTCTGGAAGC |
| | | TTTATCCCAGAGGGGCACCTGCCAGATGGCAGCTGGAGC |
| | | TCTCCTGTATGAGGTGTCTGTTGACCCCTGCTGGGAGGT |
| | | GTCTGCCAGTCAGGAGGCACGGGGTCAGGGACCCACTT |
| | | GAGGAGGCAGTCTGTCCCTTAGCAGAGCTCGAGCACTGT |
| | | GCTGGGAGATCTGCTTCTCTTTTCAGAGCCAGAAGGCAG |
| | | GAATGTTTAAGTCTGTAGAACTGTGCCCACAGCCGCTCC |
| | | TTTCCCCCAGGT |
| 347 | AluSq2 | GCCGAGCGCGGTGGCTCAAGCCTGTAATCCCACCACTTT |
| | (SINE/Alu) | GGGAGGCAAAGGTGGGTGAATCACCTGAGGTCAGGAGT |
| | | TCGAGACCAGCCTGACCAACATGGTGAAACCCCATCTCT |
| | | ACTAAAAATACAAAAATTAGCCAGGCCTGGTGTCGGGT |
| | | GCCTGTAATCCCAGCTACTCAGGAGGCTGAGACAGGAG |
| | | AATCACTTGAACCCAGGAGGTGGAGGTTGCAGTAAGCC |
| | | GAGACCGTGCCCATTGCACTCCAATCTGGGCGACGAGA |
| | | GTGAAACTCCATCTTAAAAAAAAAAAAAAA |
| 348 | L1P3 | GCCATTTTCACGATATTGATTCTTCCTATCCATGAGCACG |
| | (LINE/L1) | GAATGTTTTTCCATTCGTTTCTGTCCTCTCTTATTGCCTTG |
| | | AGCAGTGGTTTGTAGATCTCCTTGAAGAGGTCCTTCACA |
| | | TCCTTTGTAAGTTGGATTCCTAGGTATTTTATTCTCTTTGT |
| | | AGCAATTGTGAATGGGAGTTCACTCATGATTTCA |
| 349 | LTR41C | CCTTAATAGTTAATCTCCTATTAATAAGTAAGTGATTCTT |
| | (LTR/ERVL) | TAATTAAACTTTCCTCATTCAAATGGCCATATGCTTTCTG |
| | | TCTCTCGACTAGATGCTGAGTGATATACCCCCCA |

### Cargo

[0157] In some embodiments, the present disclosure provides compositions and methods for cell-, tissue-, and/or organ-specific binding, targeting, uptake, nuclear localization and/or genomic integration of a cargo. A synthetic delivery system disclosed herein can be used to deliver a cargo to a target cell. For example, a recognition sequence of a synthetic delivery system can bind to a receptor disclosed herein, thereby facilitating binding, uptake, nuclear localization, and/or genomic integration of the cargo of the synthetic delivery system.

[0158] A cargo can be delivered to a membrane or surface of a target cell. A cargo can be delivered to the cytoplasm of a target cell. A cargo can be delivered to the cytosol of a target cell. A cargo can be delivered to the nucleus of a target cell.

[0159] A cargo can be or can comprise, consist essentially of, or consist of a nucleic acid cargo. A cargo can be or can comprise a DNA, such as a dsDNA or a ssDNA. A cargo can be, comprise, or encode an RNA, such as an mRNA, rRNA, tRNA, siRNA, shRNA, or ncRNA. A cargo can be or can comprise a transgene.

[0160] A cargo can be or can comprise a nucleic acid that encodes a protein. A cargo can be or can comprise a nucleic acid that encodes a therapeutic protein. A cargo can be or can comprise a nucleic acid that encodes, for example, a cytotoxic polypeptide (e.g., a caspase, such as a self-activating, inducible, or non-inducible caspase, a protein that induces p53-mediated apoptotic cell killing CASP3, CASP8, CASP9, BAX, DNA fragmentation factor (DFF) 40, or Herpes Simplex Virus Thymidine Kinase (HSV-TK)), a tumor suppressor, an antigenic peptide, an antibody or antigen-binding fragment thereof, an enzyme, a cytokine, a signaling molecule, a microbial (e.g., bacterial or viral) antigen or epitope, a polypeptide that increases an immune response, or a polypeptide that reduces an immune response. A cargo can be or can comprise a nucleic acid that encodes a diagnostic protein. A cargo gene that encodes a protein can be operatively linked to and/or under regulatory control of a promoter, such as a promoter that is also part of the cargo. The promoter can be, for example, constitutive, inducible, and/or cell type-specific for expression of an RNA and/or protein in the target cell. A cargo can be, comprise, or encode an immunomodulatory factor. A cargo can be, comprise, or encode an immune checkpoint modulator, such as an immune checkpoint inhibitor or activator. A cargo can be or can comprise a diagnostic protein. A cargo can be, comprise, or encode a one or more neoantigens or tumor associated antigens. A cargo can be, comprise, or encode a factor that alters sensitivity of a target cell to a drug. A cargo can be a nucleic acid that encodes an immune receptor, such as a chimeric antigen receptor (CAR). A cargo can be or can comprise a nucleic acid that does not encode a protein.

[0161] In some embodiments, a cargo encodes an endogenous protein or functional RNA molecule that is either lacking or functionally impaired in a subject. In some embodiments, a subject carries a mutation in a gene, such as cancerous mutation, a loss-of function mutation, or a gain-of-function mutation that can be treated by supplying a therapeutic cargo, for example, a transgene encoding the lacking or functionally impaired protein or RNA, or to inhibit a pathogenic protein or RNA.

[0162] In some embodiments, a cargo is a nucleic acid that inserts into the genome and causes genetic or genomic instability and cell death (e.g., of a cancer target cell).

[0163] In some embodiments, a cargo is a nucleic acid that includes a natural or unnatural nucleotide analogue or base.

[0164] A cargo can be or can comprise a polypeptide. The polypeptide can be a therapeutic polypeptide. The polypeptide can be a diagnostic polypeptide. The polypeptide can be an anti-cancer polypeptide. The polypeptide can be a cytotoxic peptide, for example, inducing cell death, of the target cell, such as apoptosis, necroptosis, or necrosis. A cargo can be or can comprise, for example, a tumor suppressor, an antigenic peptide, an antibody or antigen-binding fragment thereof, an enzyme, a cytokine, a signaling molecule, a polypeptide that increases an immune response, or a polypeptide that reduces an immune response.

[0165] A cargo can be or can comprise a small or organic molecule (e.g., small molecule therapeutic or fluorescent dye). The small or organic molecule can be a therapeutic agent. The small or organic molecule can be a diagnostic agent. The small or organic molecule can be a cytotoxic agent. The small or organic molecule can be an anti-cancer drug. The small or organic molecule can be a kinase inhibitor.

[0166] In some embodiments, a cargo can be a dye (e.g., a fluorescent dye), a radioactive isotope, or a contrast agent for use in diagnostic imaging in vivo.

[0167] In some embodiments, a cargo is a detectable label (e.g., a fluorescent label, quantum dot, a Quasar Dye, or a radioactive label). A detectable label can be a radioactive label (e.g., a radioactive isotope) that facilitates the visualization of distribution of the herein disclosed constructs via positron emission tomography (PET) or single photon emission computed tomography (SPECT). A detectable moiety can comprise a radioactive isotope of at least one element.

[0168] A cargo can be or can comprise a radionucleotide. A cargo can be or can comprise a polymer. A cargo can be or can comprise a nanoparticle. In some embodiments a cargo can cause DNA damage either from outside the target cell or from within the target cell.

[0169] A cargo can be covalently or noncovalently attached to a polynucleotide or synthetic delivery system.

[0170] In some embodiments, a synthetic delivery system does not include a cargo. For example, in some embodiments a polynucleotide disclosed herein can directly exert an effect on a target cell, e.g., by inducing cell death after binding, uptake, nuclear trafficking, and/or genomic integration of the polynucleotide. In some embodiments, a synthetic delivery system acts as an antagonist to reduce uptake of ctDNA.

### Pharmaceutical Compositions

[0171] Compositions disclosed herein can be pharmaceutical compositions (e.g., formulations), and methods can utilize pharmaceutical compositions. For example, in some embodiments provided is a pharmaceutical composition comprising a compound, such as a synthetic delivery system, and a pharmaceutically-acceptable excipient, vehicle, carrier, or diluent. In some embodiments provided is a pharmaceutical composition comprising an antagonist compound (e.g., an antagonist of a receptor associated with uptake of ctDNA) and a pharmaceutically-acceptable excipient, vehicle, carrier, or diluent.

[0172] An active compound (e.g., therapeutic agent, synthetic delivery system, or antagonist) can be combined with other chemical components, such as carriers, stabilizers, diluents, dispersing agents, suspending agents, thickening agents, and/or excipients. The pharmaceutical composition can facilitate stability of the synthetic delivery system or antagonist, and administration to an organism.

[0173] Pharmaceutical formulations for administration can include aqueous solutions of the active compounds in water soluble form. Suspensions of the active compounds can be prepared as oily injection suspensions. Suitable lipophilic solvents or vehicles include fatty oils such as sesame oil, or synthetic fatty acid esters, such as ethyl oleate or triglycerides, or liposomes. Aqueous injection suspensions can contain substances which increase the viscosity of the suspension, such as sodium carboxymethyl cellulose, sorbitol, or dextran. The suspension can also contain suitable stabilizers or agents which increase the solubility of the compounds to allow for the preparation of highly concentrated solutions. The active ingredient can be in powder form for constitution with a suitable vehicle, for example, sterile pyrogen-free water, before use.

[0174] In practicing the methods of treatment or use provided herein, therapeutically-effective amounts of the compounds described herein are administered in pharmaceutical compositions to a subject having a disease or condition to be treated. In some embodiments, the subject is a mammal such as a human. A therapeutically-effective amount can vary widely depending on the severity of the disease, the age and relative health of the subject, the potency of the compounds used, and other factors.

[0175] Pharmaceutical compositions can be formulated using one or more physiologically-acceptable carriers comprising excipients and auxiliaries, which facilitate processing of the active compounds into preparations that can be used pharmaceutically. Formulation can be modified depending upon the route of administration chosen.

[0176] The pharmaceutical compositions can include at least one pharmaceutically-acceptable carrier, diluent, or excipient and compounds described herein as free-base or pharmaceutically-acceptable salt form. Pharmaceutical compositions can contain solubilizers, stabilizers, tonicity enhancing agents, buffers, and preservatives.

[0177] Methods for the preparation of compositions comprising the compounds described herein include formulating the compounds with one or more inert, pharmaceutically-acceptable excipients or carriers to form a solid, semi-solid, or liquid composition. Solid compositions include, for example, powders, tablets, dispersible granules, capsules, and cachets. Liquid compositions include, for example, solutions in which a compound is dissolved, emulsions comprising a compound, or a solution containing liposomes, micelles, or nanoparticles comprising a compound as disclosed herein. Semi-solid compositions include, for example, gels, suspensions and creams. The compositions can be in liquid solutions or suspensions, solid forms suitable for solution or suspension in a liquid prior to use, or as emulsions. These compositions can also contain minor amounts of nontoxic, auxiliary substances, such as wetting or emulsifying agents, pH buffering agents, and other pharmaceutically-acceptable additives.

[0178] The disclosed compositions can optionally comprise pharmaceutically-acceptable preservatives.

[0179] Non-limiting examples of pharmaceutically-acceptable excipients can be found, for example, in Remington: The Science and Practice of Pharmacy, Nineteenth Ed (Easton, Pa.: Mack Publishing Company, 1995); Hoover, John E., Remington's Pharmaceutical Sciences, Mack Publishing Co., Easton, Pennsylvania 1975; Liberman, H. A. and Lachman, L., Eds., Pharmaceutical Dosage Forms, Marcel Decker, New York, N.Y., 1980; and Pharmaceutical Dosage Forms and Drug Delivery Systems, Seventh Ed. (Lippincott Williams & Wilkins 1999), each of which is incorporated by reference in its entirety.

[0180] Non-limiting examples of pharmaceutically-acceptable carriers include saline, Ringer's solution, and dextrose solution. In some embodiments, the pH of the solution can be from about 5 to about 8, from about 7 to 8, or from about 7 to about 7.5. Further carriers include sustained release preparations such as semipermeable matrices of solid hydrophobic polymers containing the compound. The matrices can be in the form of shaped articles, for example, films, liposomes, microparticles, or microcapsules.

[0181] A pharmaceutical composition described herein can be in a unit dosage form suitable for a single administration of a precise dosage. In unit dosage form, the formulation can be divided into unit doses containing appropriate quantities of one or more synthetic delivery systems, antagonists, or therapeutic agents. The unit dosage can be in the form of a package containing discrete quantities of the formulation. Non-limiting examples are packaged injectables, vials, and ampoules. An aqueous suspension composition disclosed herein can be packaged in a single-dose non-reclosable container. Multiple-dose reclosable containers can be used, for example, in combination with or without a preservative. A formulation for injection disclosed herein can be present in a unit dosage form, for example, in ampoules, or in multi dose containers with a preservative.

### Methods

Reducing Uptake of ctDNA

[0182] The transfer of ctDNA to target cells has been associated with transmission of genetic information between tumor cells, transfer of cancer-associated (e.g., oncogenic) mutations between cells, and induction or transfer of resistance of a cancer to anti-cancer therapeutic agents, such as chemotherapeutic drugs. Accordingly, compositions and methods that reduce the uptake of ctDNA by target cells can be useful.

[0183] An antagonist can be used to reduce uptake of ctDNA by target cells by interfering with the interaction between ctDNA and a receptor. The antagonist can be or comprise, for example, a receptor antagonist that binds to the receptor and blocks or reduces binding of ctDNA to the receptor, and/or blocks cellular uptake of the ctDNA mediated by or associated with the receptor. The antagonist can bind to and antagonize, for example, an armadillo-like protein, an APP (amyloid precursor protein) family member, a p120(ctn)/plakophilin subfamily member, an MHC protein, a GPCR, an adhesion protein, a tyrosine phosphatase, an integrin, an ion channel, a mineral transporter, a nutrient transporter, or an ATPase. In some embodiments, the antagonist binds to and antagonizes APLP2, PKP4, HLA-A, CD41, CD97, ITGB5, ITGA2B, Integrin αVβ5, PI4K2A, TMEM120A, PTK7A, Ceruloplasmin, PTPRF, SLC16A1, SLC7A5, ATP1B1, ATP2B4, PIP4K2A, or P142A.

[0184] In some embodiments, the antagonist binds to and antagonizes APLP2. The antagonist can be an anti-APLP2 antibody or antigen-binding fragment thereof, for example, an antibody of clone JE54-62, clone 4B5, clone EPR5938(2), clone 408813, clone 25A47, clone 11n11, clone JE54-62, clone 6H54, clone C4, clone DS203AB, clone 6D0.4, clone FQS6049(3), clone 397702, or comprising one or more CDRs therefrom.

[0185] In some embodiments, the antagonist binds to and antagonizes PKP4. The antagonist can be an anti-PKP4 antibody or antigen-binding fragment thereof, for example, an antibody of clone 433.10.3, clone 1B2, clone 406.3.1, clone 7.7.9, clone 1B11, clone 4H7, clone EML786, clone 518, or comprising one or more CDRs therefrom.

[0186] In some embodiments, the antagonist binds to and antagonizes HLA-A. The antagonist can be an anti-HLA-A antibody or antigen-binding fragment thereof, for example, an antibody of clone R0.87, clone 7G7F9, clone 3H2205, clone BB7.2, clone OTI2D11, clone OTI3H6, clone LBI4D11, clone LBI2D11, or comprising one or more CDRs therefrom.

[0187] In some embodiments, the antagonist binds to and antagonizes CD41. The antagonist can be an anti-CD41 antibody or antigen-binding fragment thereof, for example, an antibody of clone 9B10, clone HIP8, clone EPR4330, clone PM6/248, clone RKCD41, clone 7E3 (Abciximab), clone BAG 75E5, clone MEM-06, clone JM11-19, clone TBP8, or comprising one or more CDRs therefrom.

[0188] In some embodiments, the antagonist binds to and antagonizes CD97. The antagonist can be an anti-CD97 antibody or antigen-binding fragment thereof, for example, an antibody of clone VIM3b, clone MEM-180, clone 03, clone 3F10C2, clone 7, clone 3A7, clone 380905, clone 024, clone 6D7E6, clone EPR4428, clone EPR4427, clone 4G39, or comprising one or more CDRs therefrom.

[0189] In some embodiments, the antagonist binds to and antagonizes Integrin αVβ5. The antagonist can be an anti-Integrin αVβ5 antibody, an anti-ITGB5 antibody, an anti-ITGA2B antibody, or antigen-binding fragment thereof, for example, an antibody of clone ABGC-9, clone 06, clone 34D7, clone 708N2, clone 4G7, clone ABGC-9, clone 13C2, clone NKI-M7, clone 6, clone 23C6, clone 2C4, clone 900, clone 2B5A7, clone 1D8, clone 900, clone 2Q1009, clone 9E2, clone 36A4, or comprising one or more CDRs therefrom.

[0190] In some embodiments, the antagonist binds to and antagonizes PI4K2A. The antagonist can be an anti-PI4K2A antibody or antigen-binding fragment thereof, for example, an antibody of clone 4F2, clone 3E1, clone B-5, or comprising one or more CDRs therefrom.

[0191] In some embodiments, the antagonist binds to and antagonizes TMEM120A. The antagonist can be an anti-TMEM120A antibody or antigen-binding fragment thereof, for example, comprising one or more CDRs therefrom.

[0192] In some embodiments, the antagonist binds to and antagonizes PTK7. The antagonist can be an anti-PTK7 antibody or antigen-binding fragment thereof, for example, an antibody of clone 4F9, clone 2E7, clone OTI2E7, clone 525222, clone 4C6, clone 4A6, clone 188B, clone OTI1G4, clone 4D4, clone 1A8, clone 4F9A1, or comprising one or more CDRs therefrom.

[0193] In some embodiments, the antagonist binds to and antagonizes PTPRF. The antagonist can be an anti-PTPRF antibody or antigen-binding fragment thereof, for example, an antibody of clone S165-38, clone 6D7C7, clone W7C6, clone 3B1, clone N165/38, clone N165/43, clone E6W4X, clone E8W3H, or comprising one or more CDRs therefrom.

[0194] In some embodiments, the antagonist binds to and antagonizes Ceruloplasmin. The antagonist can be an anti-Ceruloplasmin antibody or antigen-binding fragment thereof, for example, an antibody of clone 3C8A5, clone FQTJTS7, clone 3B11, clone ARC5018-06-01, clone 2, clone C1, clone EPSISR6-12, clone EPSISR6-42, clone H-3, clone 6C3K9, or comprising one or more CDRs therefrom.

[0195] In some embodiments, the antagonist binds to and antagonizes SLC16A1. The antagonist can be an anti-SLC16A1 antibody or antigen-binding fragment thereof, for example, an antibody of clone 9D12, clone 20S76, clone 882616, clone 14612, clone 70-E-5, clone 35C7, clone FSS24817(C), clone GT14612, or comprising one or more CDRs therefrom.

[0196] In some embodiments, the antagonist binds to and antagonizes SLC7A5. The antagonist can be an anti-SLC7A5 antibody or antigen-binding fragment thereof, for example, an antibody of clone EPR17573, clone BU53, clone MEM-108, clone 4D9, clone IPO-T10, clone EP3-1, clone 2G5H3, clone 5E0, clone UM7F8, clone REA387, or comprising one or more CDRs therefrom.

[0197] In some embodiments, the antagonist binds to and antagonizes ATP1B1. The antagonist can be an anti-ATP1B1 antibody or antigen-binding fragment thereof, for example, an antibody of clone 464.8 (8A Beta), clone 23A21, clone 4M5T3, clone M17-P5-F11, clone 464.8, clone ARC1232, clone 16C6, clone EPR12195, or comprising one or more CDRs therefrom.

[0198] In some embodiments, the antagonist binds to and antagonizes ATP2B4. The antagonist can be an anti-ATP2B4 antibody or antigen-binding fragment thereof, for example, an antibody of clone 2C7, clone 2G8, clone 41C7, clone KBO, clone JA9, clone 5F10, clone D1, clone H8, or comprising one or more CDRs therefrom.

[0199] In some embodiments, the antagonist binds to and antagonizes PIP4K2A. The antagonist can be an anti-PIP4K2A antibody or antigen-binding fragment thereof, for example, an antibody of clone 3D3, clone 3A3, clone OTI1B2, clone OTI3D3, clone 3A9, clone D83C1, clone 3H5, clone EML620, clone DS2718AB, clone LBIlB2, or comprising one or more CDRs therefrom.

[0200] In some embodiments, the antagonist binds to and antagonizes P142A. The antagonist can be an anti-P142A antibody or antigen-binding fragment thereof, for example, comprising one or more CDRs therefrom.

[0201] In some embodiments, the antagonist is or comprises a ctDNA antagonist that binds to the ctDNA and thereby reduces binding of ctDNA to the receptor, and/or blocks cellular uptake of the ctDNA mediated by the receptor. The antagonist can bind to, for example, a target sequence in a ctDNA, polynucleotide, synthetic delivery system, or transposable element disclosed herein. The antagonist can bind to a recognition sequence in the ctDNA.

[0202] An antagonist can be or can comprise a protein, polypeptide, or peptide.

[0203] An antagonist can be synthetic, artificial, engineered, or non-naturally occurring, e.g., within a subject.

[0204] An antagonist can be or can comprise an antibody or an antigen-binding fragment thereof. The antibody or antigen-binding fragment thereof can be or can comprise any antibody class, isotype, and/or suitable fragment, including those disclosed herein. The antibody or antigen-binding fragment can be monoclonal. The antibody or antigen-binding fragment can be polyclonal. The antibody or antigen-binding fragment can be recombinant. The antibody or antigen-binding fragment can be artificial, engineered, or non-naturally occurring.

[0205] An antibody can be described with reference to the basic four chain antibody unit, which comprises two heavy chain (H) polypeptide sequences and two light chain (L) polypeptide sequences. Each of the heavy chains can comprise one N-terminal variable (VH) domain and three or four C-terminal constant domains (CH1, CH2, and CH3, and in some cases CH4). Each of the light chains can comprise one N-terminal variable (VL) domain and one C-terminal constant (CL) domain. The light chain variable domain is aligned with the heavy chain variable domain and the light chain constant domain is aligned with heavy chain constant domain CH1. Each light chain is linked to a heavy chain by one covalent disulfide bond. The two heavy chains are linked to each other by one or more disulfide bonds depending on the heavy chain isotype. Each heavy and light chain also comprises regularly-spaced intrachain disulfide bridges. The C-terminal constant domains of the heavy chains (e.g., CH2 and CH3, or CH2, CH3, and CH4) comprise the Fc region, Fc domain, or Fc fragment of the antibody, which can mediate effector functions, for example, through interactions with Fc receptors or complement proteins.

[0206] The light chain can be designated kappa or lambda based on the amino acid sequence of the constant region. The heavy chain can be designated alpha, delta, epsilon, gamma, or mu based on the amino acid sequence of the constant region. Antibodies can be categorized into five immunoglobulin classes, or isotypes, based on the heavy chain. IgA comprises alpha heavy chains, IgD comprises delta heavy chains, IgE comprises epsilon heavy chains, IgG comprises gamma heavy chains, and IgM comprises mu heavy chains. Antibodies of the IgG, IgD, and IgE classes comprise monomers of the four chain unit described above (two heavy and two light chains), while the IgM and IgA classes can comprise multimers of the four chain unit. The alpha and gamma classes are further divided into subclasses on the basis of differences in the sequence and function of the heavy chain constant region. Subclasses of IgA and IgG expressed by humans include IgG1, IgG2, IgG3, IgG4, IgA1, and IgA2.

[0207] An antagonist disclosed herein can comprise, for example, an IgG, IgG1, IgG2, IgG3, IgG4, IgA, IgA1, IgA2, IgD, IgE, or IgM class antibody, or a fragment (e.g., Fc region) thereof.

[0208] Generally the constant regions of an antibody can mediate various effector functions, while the variable regions primarily mediate antigen binding. Different IgG isotypes or subclasses can be associated with different effector functions or therapeutic characteristics, for example, because of interactions with different Fc receptors and/or complement proteins. Antibodies comprising constant domains or Fc regions that engage activating Fc receptors can, for example, participate in antibody-dependent cell-mediated cytotoxicity (ADCC), antibody-dependent cellular phagocytosis (ADCP), complement-dependent cytotoxicity (CDC), induction of signaling through immunoreceptor tyrosine-based activation motifs (ITAMs), and induction of cytokine secretion. Antibodies comprising Fc regions that engage inhibitory Fc receptors can, for example, induce signaling through immunoreceptor tyrosine-based inhibitory motifs (ITIMs).

[0209] Different antibody subclasses comprise varying abilities to elicit immune effector functions, which can be utilized or modified in antagonists disclosed herein. For example, wild type IgG1 and IgG3 can effectively recruit complement to activate CDC, and IgG2 elicits minimal ADCC. IgG4 has a lesser ability to trigger immune effector functions and can be used, e.g., where reduced immune effector functions are desired.

[0210] The variable (V) regions of an antibody or antigen-binding fragment thereof can mediate antigen binding and define the specificity of a particular antibody for an antigen. The variable region comprises relatively invariant sequences called framework regions, and hypervariable regions, which differ considerably in sequence among antibodies of different binding specificities. The variable region of each antibody heavy or light chain comprises four framework regions separated by three hypervariable regions. The variable regions of heavy and light chains fold in a manner that brings the hypervariable regions together in close proximity to create an antigen binding site. The four framework regions largely adopt an f3-sheet configuration, while the three hypervariable regions form loops connecting, and in some cases forming part of, the f3-sheet structure.

[0211] Within hypervariable regions are amino acid residues that primarily determine the binding specificity of the antibody. Sequences comprising these residues are known as complementarity determining regions (CDRs). One antigen binding site of an antibody can comprise six CDRs, three in the hypervariable regions of the light chain, and three in the hypervariable regions of the heavy chain. The CDRs in the light chain are designated L1, L2, and L3, while the CDRs in the heavy chain are designated H1, H2, and H3. CDRs can also be designated LCDR1, LCDR2, LCDR3, HCDR1, HCDR2, and HCDR3, respectively. The contribution of each CDR to antigen binding varies among antibodies. For example, in some embodiments HCDR3 primarily determines antigen specificity, and one or more other CDRs can be dispensable or specificity can be maintained despite mutations in the other CDRs. CDRs can vary in length. For example, CDRs are often 5 to 14 residues in length, but CDRs as short as 0 residues or as long as 25 residues or longer exist. Several methods are used to predict or designate CDR sequences.

[0212] Certain antibodies or antigen-binding domains contain less than six CDRs. For example, certain antibodies lack a light chain, and can be referred to as heavy chain only antibodies (HCAbs). HCAbs have three CDRs in a variable region referred to as VHH. A single domain antibody, or nanobody, can be generated from such a VHH region of a heavy chain only antibody.

[0213] An antagonist disclosed herein can comprise a suitable set of one or more CDRs (e.g., six CDRs or three CDRs) to bind to a receptor and antagonize it. The CDRs can be as identified by, for example, the Kabat, Chothia, IMGT, paratome, or AHo method. Single domain antibody CDRs can be identified, for example, using the single domain antibody database (SAbDab), based on common sequence elements, or based on a sequence alignment to the Chothia numbering scheme.

[0214] In some embodiments, an antagonist is or comprises an antigen-binding fragment. An antigen-binding fragment can be, for example, a Fab, Fab′, F(ab′)2, dimer or trimer of Fab conjugates, Fv, scFv, minibody, dia-, tria-, and tetrabody, nanobody, VHH, or linear antibody.

[0215] In some embodiments, an antagonist is or comprises an antigen-binding fragment of an ankyrin protein, ankyrin repeat protein, designed ankyrin repeat protein (DARPin), affibody, avimer, adnectin, anticalin, Fynomer, Kunitz domain, knottin, or β-hairpin mimetic.

[0216] An antagonist can be or can comprise a ligand of the receptor associated with uptake of ctDNA or a derivative of the ligand, for example, a peptide ligand, a peptide mimetic ligand, a protein or polypeptide ligand, a chemical ligand, or a small molecule ligand.

[0217] An antagonist can be or can comprise a receptor, one or more domains thereof, and/or a soluble form thereof. The receptor, one or more domains thereof, and/or a soluble form thereof can comprise a ligand binding domain that binds to a ctDNA to be antagonized. Accordingly, the antagonist can act as a decoy that competes for binding to ctDNA, reducing binding of the ctDNA to the receptor that is associated with uptake of the ctDNA. For example, in some embodiments the antagonist is or comprises an armadillo-like protein, an APP (amyloid precursor protein) family member, a p120(ctn)/plakophilin subfamily member, an MHC protein, a GPCR, an adhesion protein, a tyrosine phosphatase, an integrin, an ion channel, a mineral transporter, a nutrient transporter, an ATPase, one or more domains thereof, or a soluble form thereof. In some embodiments the antagonist is or comprises APLP2, PKP4, HLA-A, CD41, CD97, Integrin αVβ5, PI4K2A, TMEM120A, PTK7A, Ceruloplasmin, PTPRF, SLC16A1, SLC7A5, ATP1B1, ATP2B4, PIP4K2A, P142A, one or more domains thereof, or a soluble form thereof.

[0218] An antagonist can be or can comprise a small molecule antagonist. An antagonist can be or can comprise a small chemical entity. An antagonist can be or can comprise an organic or inorganic chemical entity. In some embodiments, an antagonist has a low molecular weight (e.g., at most 1000 Daltons, at most 500 Daltons, or at most 2500 Daltons).

[0219] An antagonist can be or can comprise a polynucleotide. A polynucleotide antagonist can be, for example, DNA (such as ssDNA or dsDNA), or RNA. In some embodiments, the antagonist is or comprises a nucleic acid sequence identified in circulating tumor DNA (ctDNA), or a derivative thereof. For example, a nucleotide sequence from a ctDNA that binds to a receptor, such as a recognition sequence, can be used. In some embodiments, the nucleotide sequence from the ctDNA lacks an element that induces uptake of the ctDNA in native ctDNA. In some embodiments, the nucleotide sequence from the ctDNA is used without a cargo or associated sequence, such that substantially no cargo is delivered to the target cell upon binding of the polynucleotide to the receptor. In some embodiments, the antagonist is a polynucleotide antagonist that binds to the receptor. In some embodiments, the antagonist is a polynucleotide antagonist that binds to the ctDNA. In some embodiments, the antagonist is a polynucleotide antagonist that binds to the receptor and the ctDNA.

[0220] An antagonist can bind to a target molecule (e.g., receptor) with a K_{D} of, for example, less than about 100 mM, less than about 10 mM, less than about 1 mM, less than about 500 μM, less than about 100 μM, less than about 50 μM, less than about 10 μM, less than about 5 μM, less than about 4 μM, less than about 3 μM, less than about 2 μM, less than about 1 μM, less than about 900 nM, less than about 800 nM, less than about 700 nM, less than about 600 nM, less than about 500 nM, less than about 400 nM, less than about 300 nM, less than about 200 nM, less than about 100 nM, less than about 90 nM, less than about 80 nM, less than about 70 nM, less than about 60 nM, less than about 50 nM, less than about 40 nM, less than about 30 nM, less than about 20 nM, less than about 10 nM, less than about 5 nM, less than about 4 nM, less than about 3 nM, less than about 2 nM, less than about 1 nM, less than about 900 μM, less than about 800 μM, less than about 700 μM, less than about 600 μM, less than about 500 μM, less than about 400 μM, less than about 300 μM, less than about 200 μM, less than about 100 μM, less than about 10 μM, or less than about 1 μM.

[0221] An antagonist can be contacted to a target cell or receptor to reduce uptake of ctDNA. The contacting can be in vivo. The contacting can be in vitro. The contacting can be ex vivo.

[0222] In some embodiments, the contacting comprises exposing the target cells to the antagonist at a concentration of at least 1 μM, at least 10 μM, at least 100 μM, at least 1 nM, at least 10 nM, at least 100 nM, at least 1 μM, at least 10 μM, at least 100 μM, or at least 1 mM.

[0223] In some embodiments, the contacting comprises exposing the target cells to the antagonist at a concentration of at most 1 μM, at most 10 μM, at most 100 μM, at most 1 nM, at most 10 nM, at most 100 nM, at most 1 μM, at most 10 μM, at most 100 μM, or at most 1 mM.

[0224] In some embodiments, the contacting comprises exposing the target cells to the antagonist at a concentration of about 1 μM, about 10 μM, about 100 μM, about 1 nM, about 10 nM, about 100 nM, about 1 μM, about 10 μM, about 100 μM, or about 1 mM.

[0225] In some embodiments, the contacting comprises exposing the target cells to the antagonist at a concentration of about 1 μM to about 10 μM, about 1 μM to about 100 μM, about 1 μM to about 1 nM, about 1 μM to about 10 nM, about 1 μM to about 100 nM, about 1 μM to about 1 μM, about 1 μM to about 10 μM, about 1 μM to about 100 μM, about 1 μM to about 1 mM, about 1 μM to about 10 mM, about 1 μM to about 100 mM, about 1 nM to about 10 nM, about 1 nM to about 100 nM, about 1 nM to about 1 μM, about 1 nM to about 10 μM, about 1 nM to about 100 μM, about 1 nM to about 1 mM, about 1 nM to about 10 mM, about 1 nM to about 100 mM, about 1 μM to about 10 μM, about 1 μM to about 100 μM, about 1 μM to about 1 mM, about 1 μM to about 10 mM, or about 1 μM to about 100 mM.

[0226] In some embodiments, the contacting comprises exposing the target cells to the antagonist at a concentration of at least 1 μg/mL, at least 10 μg/mL, at least 100 μg/mL, at least 1 ng/mL, at least 10 ng/mL, at least 100 ng/mL, at least 1 ag/mL, at least 10 μg/mL, at least 100 μg/mL, or at least 1 mg/mL.

[0227] In some embodiments, the contacting comprises exposing the target cells to the antagonist at a concentration of at most 1 μg/mL, at most 10 μg/mL, at most 100 μg/mL, at most 1 ng/mL, at most 10 ng/mL, at most 100 ng/mL, at most 1 μg/mL, at most 10 μg/mL, at most 100 μg/mL, or at most 1 mg/mL.

[0228] In some embodiments, the contacting comprises exposing the target cells to the antagonist at a concentration of about 1 μg/mL, about 10 μg/mL, about 100 μg/mL, about 1 ng/mL, about 10 ng/mL, about 100 ng/mL, about 1 μg/mL, about 10 μg/mL, about 100 μg/mL, or about 1 mg/mL.

[0229] In some embodiments, the contacting comprises exposing the target cells to the antagonist at a concentration of about 1 μg/mL to about 10 μg/mL, about 1 μg/mL to about 100 μg/mL, about 1 μg/mL to about 1 ng/mL, about 1 μg/mL to about 10 ng/mL, about 1 μg/mL to about 100 ng/mL, about 1 μg/mL to about 1 μg/mL, about 1 μg/mL to about 10 g/mL, about 1 μg/mL to about 100 μg/mL, about 1 μg/mL to about 1 mg/mL, about 1 μg/mL to about 10 mg/mL, about 1 μg/mL to about 100 mg/mL, about 1 ng/mL to about 10 ng/mL, about 1 ng/mL to about 100 ng/mL, about 1 ng/mL to about 1 μg/mL, about 1 ng/mL to about g/mL, about 1 ng/mL to about 100 μg/mL, about 1 ng/mL to about 1 mg/mL, about 1 ng/mL to about 10 mg/mL, about 1 ng/mL to about 100 mg/mL, about 1 μg/mL to about 10 g/mL, about 1 μg/mL to about 100 μg/mL, about 1 μg/mL to about 1 mg/mL, about 1 g/mL to about 10 mg/mL, or about 1 μg/mL to about 100 mg/mL.

[0230] In some embodiments, contacting (e.g., treating) the target cell with an antagonist (e.g., antibody) that binds the receptor (e.g., receptor protein), such as an anti-HLA-A, anti-PKP4, anti-APLP2, anti-TMEM, anti-CD41, anti-CD97, anti-Integrin αVβ5, anti-ITGB5, anti-ITGA2B, anti-Integrin 05, anti-PI4K2A, anti-PIP4K2A, anti-TMEM120A, anti-PTK7A, anti-ceruloplasmin, anti-PTPRF, anti-SLC16A1, anti-SLC7A5, anti-ATP1B1, or anti-ATP2B4 antagonist (e.g., antibody), or contacting the ctDNA with an antagonist that binds the ctDNA, reduces binding of the cargo, synthetic delivery system, polynucleotide, or ctDNA to the target cell by at least about 5%, at least about 10%, at least about 15%, at least about 20%, at least about 30%, at least about 40%, at least about 50%, at least about 60%, at least about 70%, at least about 80%, at least about 90%, at least about 95%, or at least about 99%, for example, as determined by a confocal fluorescence microscopy assay or an Amplified Luminescent Proximity Homogeneous Assay.

[0231] In some embodiments, contacting (e.g., treating) the target cell with an antagonist (e.g., antibody) that binds the receptor (e.g., receptor protein), such as an anti-HLA-A, anti-PKP4, anti-APLP2, anti-TMEM, anti-CD41, anti-CD97, anti-Integrin αVβ5, anti-ITGB5, anti-ITGA2B, anti-Integrin 05, anti-PI4K2A, anti-PIP4K2A, anti-TMEM120A, anti-PTK7A, anti-ceruloplasmin, anti-PTPRF, anti-SLC16A1, anti-SLC7A5, anti-ATP1B1, or anti-ATP2B4 antagonist (e.g., antibody), or contacting the ctDNA with an antagonist that binds the ctDNA, reduces uptake of the cargo, synthetic delivery system, ctDNA, or polynucleotide by the target cell by at least about 5%, at least about 10%, at least about 15%, at least about 20%, at least about 30%, at least about 40%, at least about 50%, at least about 60%, at least about 70%, at least about 80%, at least about 90%, at least about 95%, or at least about 99%, for example, as determined by a confocal fluorescence microscopy assay.

[0232] In some embodiments, contacting (e.g., treating) the target cell with an antagonist (e.g., antibody) that binds the receptor (e.g., receptor protein), such as an anti-HLA-A, anti-PKP4, anti-APLP2, anti-TMEM, anti-CD41, anti-CD97, anti-Integrin αVβ5, anti-Integrin 05, anti-ITGB5, anti-ITGA2B, anti-PI4K2A, anti-PIP4K2A, anti-TMEM120A, anti-PTK7A, anti-ceruloplasmin, anti-PTPRF, anti-SLC16A1, anti-SLC7A5, anti-ATP1B1, or anti-ATP2B4 antagonist (e.g., antibody), or contacting the ctDNA with an antagonist that binds the ctDNA, reduces nuclear localization of the cargo, synthetic delivery system, ctDNA, or polynucleotide in the target cell by at least about 5%, at least about 10%, at least about 15%, at least about 20%, at least about 30%, at least about 40%, at least about 50%, at least about 60%, at least about 70%, at least about 80%, at least about 90%, at least about 95%, or at least about 99%, for example, as determined by a confocal fluorescence microscopy assay.

[0233] In some embodiments, contacting (e.g., treating) the target cell with an antagonist (e.g., antibody) that binds the receptor (e.g., receptor protein), such as an anti-HLA-A, anti-PKP4, anti-APLP2, anti-TMEM, anti-CD41, anti-CD97, anti-Integrin αVβ5, anti-Integrin 05, anti-PI4K2A, anti-PIP4K2A, anti-TMEM120A, anti-PTK7A, anti-ceruloplasmin, anti-PTPRF, anti-SLC16A1, anti-SLC7A5, anti-ATP1B1, or anti-ATP2B4 antagonist (e.g., antibody), or contacting the ctDNA with an antagonist that binds the ctDNA, reduces integration of the cargo, synthetic delivery system, ctDNA, or polynucleotide into the target cell's genome by at least about 5%, at least about 10%, at least about 15%, at least about 20%, at least about 30%, at least about 40%, at least about 50%, at least about 60%, at least about 70%, at least about 80%, at least about 90%, at least about 95%, or at least about 99% for example, as determined by a metaphase chromosome spread assay.

[0234] An antagonist of a receptor that is associated with uptake of ctDNA can be administered to a subject in need thereof, for example, to reduce uptake of the ctDNA by target cells in the subject. The antagonist can be administered in a therapeutically-effective dose and via any suitable route of administration, including those disclosed herein. An average effect can be measured in a cohort of subjects.

[0235] The target cells can be cancer cells and administering the antagonist can reduce or delay development of resistance of the cancer cells to an anti-cancer therapeutic agent, such as an anti-cancer chemotherapeutic drug, kinase inhibitor, or checkpoint inhibitor. An average effect can be measured in a cohort of subjects.

[0236] The subject can have a cancer and administering the antagonist can reduce or delay development of resistance of the cancer to an anti-cancer therapeutic agent, such as an anti-cancer chemotherapeutic drug, kinase inhibitor, or checkpoint inhibitor. An average effect can be measured in a cohort of subjects.

[0237] The subject can have a cancer and administering the antagonist can reduce or delay metastasis of the cancer, for example, prolong the average time to metastasis, reduce the average size of metastases, or reduce the incidence of metastasis in a cohort of subjects.

[0238] The subject can have a cancer and administering the antagonist can reduce or delay tumor growth or progression of the cancer to a more advanced stage, for example, using suitable criteria for cancer progression and/or tumor growth (e.g., International Uniform Response Criteria for Multiple Myeloma, or RECIST criteria). An average effect can be measured in a cohort of subjects.

[0239] The antagonist can be administered by any suitable route, for example, systemically, locally, parenterally, intravenously, subcutaneously, intramuscularly, intratumorally, by inhalation, dermally, topically, orally, sublingually, intrathecally, transdermally, intranasally, via a peritoneal route, directly into the brain (e.g., via and intracerebral ventricle route).

[0240] In some embodiments, contacting (e.g., treating) a ctDNA, synthetic delivery system, or polynucleotide with an antagonist (e.g., antibody) can reduce binding, uptake, or nuclear localization of a ctDNA, synthetic delivery system, cargo, or polynucleotide by the target cell, for example, as determined by a confocal fluorescence microscopy assay.

[0241] In some embodiments, contacting (e.g., treating) a ctDNA, synthetic delivery system, or polynucleotide with an antagonist (e.g., anti-DNA antibody, such as an anti-dsDNA antibody) reduces binding of the ctDNA, cargo, synthetic delivery system, or polynucleotide to the receptor or target cell by at least about 5%, at least about 10%, at least about 15%, at least about 20%, at least about 30%, at least about 40%, at least about 50%, at least about 60%, at least about 70%, at least about 80%, at least about 90%, at least about 95%, or at least about 99%, for example, as determined by a confocal fluorescence microscopy assay or an Amplified Luminescent Proximity Homogeneous Assay.

[0242] In some embodiments, contacting (e.g., treating) a ctDNA, synthetic delivery system, or polynucleotide with an antagonist (e.g., anti-DNA antibody, such as an anti-dsDNA antibody) reduces uptake of the ctDNA, cargo, synthetic delivery system, or polynucleotide by the target cell by at least about 5%, at least about 10%, at least about 15%, at least about 20%, at least about 30%, at least about 40%, at least about 50%, at least about 60%, at least about 70%, at least about 80%, at least about 90%, at least about 95%, or at least about 99%, for example, as determined by a confocal fluorescence microscopy assay.

[0243] In some embodiments, contacting (e.g., treating) a ctDNA, synthetic delivery system, or polynucleotide with an antagonist (e.g., anti-DNA antibody, such as an anti-dsDNA antibody) reduces nuclear localization of the ctDNA, cargo, synthetic delivery system, or polynucleotide in the target cell by at least about 5%, at least about 10%, at least about 15%, at least about 20%, at least about 30%, at least about 40%, at least about 50%, at least about 60%, at least about 70%, at least about 80%, at least about 90%, at least about 95%, or at least about 99%, for example, as determined by a confocal fluorescence microscopy assay.

[0244] In some embodiments, contacting (e.g., treating) a ctDNA, synthetic delivery system, or polynucleotide with an antagonist (e.g., anti-DNA antibody, such as an anti-dsDNA antibody) reduces integration of the ctDNA, cargo, synthetic delivery system, or polynucleotide into the target cell's genome by at least about 5%, at least about 10%, at least about 15%, at least about 20%, at least about 30%, at least about 40%, at least about 50%, at least about 60%, at least about 70%, at least about 80%, at least about 90%, at least about 95%, or at least about 99% for example, as determined by a metaphase chromosome spread assay.

[0245] In some embodiments, contacting (e.g., treating) a ctDNA, synthetic delivery system, polynucleotide, target cell, or receptor with an antagonist disclosed herein reduces colocalization of the ctDNA, synthetic delivery system, or polynucleotide with the receptor by at least about 5%, at least about 10%, at least about 15%, at least about 20%, at least about 30%, at least about 40%, at least about 50%, at least about 60%, at least about 70%, at least about 80%, at least about 90%, at least about 95%, or at least about 99%, for example, as determined by a confocal fluorescence microscopy assay.

Determining Expression of a Receptor Associated with Uptake of ctDNA

[0246] Methods disclosed herein can include measuring an expression level of a receptor that is associated with uptake of a ctDNA, polynucleotide, transposable element, or synthetic delivery system. For example, a biological sample can be assayed to determine whether the receptor is expressed in the biological sample at a level that is associated with uptake of the ctDNA, polynucleotide, transposable element, or synthetic delivery system.

[0247] An assay can be performed on a biological sample to measure an expression level of a receptor that is associated with uptake of a ctDNA, polynucleotide, transposable element, or synthetic delivery system. The assay can measure expression of the receptor at protein level and/or mRNA level, e.g., can quantify or qualify an expression level of the receptor protein, or an mRNA encoding the receptor. Any suitable assay can be used to determine the expression level of the receptor. Non-limiting examples of assays that can be used include immunohistochemistry, ELISA, multiplex immunoassay, mass spectrometry (e.g., targeted or untargeted), fluorescence microscopy, flow cytometry, quantitative PCR (e.g., quantitative reverse transcriptase real time PCR), digital PCR, and RNA sequencing. In some embodiments, the assay is quantitative. In some embodiments, the assay is semi-quantitative, for example, provides a relative expression level to a control.

[0248] An assay can utilize an agent that binds to the receptor that is associated with uptake of the ctDNA, polynucleotide, transposable element, or synthetic delivery system. The agent that binds to the receptor can be, for example, an antibody or antigen-binding fragment thereof. The agent that binds to the receptor can be or comprise a polypeptide. The agent that binds to the receptor can be or comprise a ligand of the receptor. The agent can be conjugated directly or indirectly to a detectable probe, for example, a fluorescent molecule. The agent can be conjugated directly or indirectly to a factor that provides a signal relative to the amount of receptor detected, for example, an enzyme that mediates a proportional fluorescent, luminescent, or colorimetric change in response to a substrate (e.g., luciferase/luciferin, horse radish peroxidase/3,3′,5,5′-Tetramethylbenzidine (TMB), or alkaline phosphatase).

[0249] In some embodiments, a method of determining an expression level of a receptor comprises contacting the receptor or biological sample with an antibody that binds to the receptor, and contacting the biological sample or antibody with a detection agent that induces a detectable signal based on a presence of or proportional to a level of the antibody bound to the receptor.

[0250] In some embodiments, the disclosure provides a method of determining an expression level of a receptor that comprises an immunohistochemistry assay. The biological sample can be appropriately prepared for immunohistochemistry (for example, collected, fixed, embedded, sectioned, mounted, de-paraffinized, and subject to antigen retrieval). The method can comprise blocking endogenous target activity, blocking nonspecific binding sites, sample labelling (e.g., immunodetection, counterstaining, sealing), visualization/imaging, or a combination thereof.

[0251] An assay can utilize an agent that binds to an mRNA that encodes the receptor, for example, a nucleic acid that is complementary or reverse complementary to a portion of the mRNA. The agent can be conjugated directly or indirectly to a detectable probe, for example, a fluorescent molecule.

[0252] The method or assay can comprise determining that the receptor is expressed at a level that is associated with the uptake of the ctDNA, polynucleotide, transposable element, or synthetic delivery system. A level that is associated with the uptake of the ctDNA, polynucleotide, transposable element, or synthetic delivery system can be determined, for example, by comparing levels of expression of the receptor (e.g., via an assay disclosed herein) among samples of target cells that exhibit various levels of uptake of the ctDNA, polynucleotide, transposable element, or synthetic delivery system (e.g., detectably labelled, such as fluorescently labelled). The samples of target cells can be primary cells or cell lines. The samples of target cells can comprise artificially modified levels of expression of the receptor, for example, via knockdown or knockout of expression of the receptor, and/or via inducing expression from artificial constructs using promoters that drive different levels of expression, or can be induced to drive different levels of expression via an inducible and/or repressible mechanism. In some embodiments, a level of receptor expression associated with uptake of the ctDNA, polynucleotide, transposable element, or synthetic delivery system can vary by receptor, ctDNA, polynucleotide, synthetic delivery system, transposable element, synthetic construct, and/or target cell type.

[0253] A biological sample can comprise or can be a liquid. A biological sample can be a liquid biopsy. A biological sample can be or can comprise, for example, blood (e.g., whole blood).

[0254] A biological sample can be or can comprise a solid. A biological sample can be or can comprise a solid tissue sample from any organ or tissue. A biological sample can be or can comprise a biopsy that comprises tumor tissue or is suspected to comprise tumor tissue. A biological sample can comprise tumor tissue, for example, of any cancer or tumor type disclosed herein. A biological sample can comprise cancer cells, for example, of any cancer or tumor type disclosed herein. A biological sample can comprise predominantly cells from a specific organ or from a tissue within a specific organ. An organ can refer to a group of cells, for example, in a liquid or solid form, with or without an extracellular matrix. In some embodiments, cells within an organ (e.g., in a healthy subject) have a biological function that distinguishes them from other cells outside the organ. A biological sample can comprise or can be a tissue sample. A biological sample can be obtained as part of a biopsy. A biological sample can be obtained as part of a surgery.

[0255] A biological sample can comprise biological material that is fresh frozen (FF), fixed (e.g., in neutral buffered formalin or any other tissue fixative), formalin fixed paraffin embedded (FFPE), cryopreserved, incubated in RNA and/or protein stabilizing reagents, or otherwise preserved or stabilized for the maximum recovery of RNA and/or protein from within the sample.

[0256] In some embodiments, a biological sample is isolated from a subject that is being screened for cancer, is suspected of having cancer, is diagnosed with cancer, or is being monitored for cancer recurrence or relapse. The biological sample can comprise primary tumor tissue, metastatic tumor tissue, precancerous tissue, and/or tissue that is believed to contain tumor cells or precancerous cellular changes. The biological sample can contain tumor-infiltrating immune cells or other cells in the tumor tissue or in adjacent normal tissue. The biological sample can be a biological sample encountered in clinical pathology, including but not limited to, sections of tissues such as biopsy or tissue removed during surgical or other procedures, bodily fluids, autopsy samples, or frozen sections taken for histological or histopathological purposes. Such biological samples can include blood and blood fractions or products, sputum, effusion, cheek cells tissue, patient-derived cultured cells (e.g., primary cultures, explants, and transformed cells), stool, urine, other biological or bodily fluids. etc.

[0257] A biological sample can be obtained from a subject before a treatment (e.g., administration of a therapeutic agent or synthetic delivery system), during a treatment, or after a treatment. In some embodiments, biological samples are obtained from a subject before a treatment, during the treatment, and/or after the treatment. In some embodiments, an initial biological sample is obtained from a subject and a subsequent biological sample is obtained from the subject later (e.g., months or years later, for comparison).

[0258] In some embodiments, a biological sample is or has been examined by a certified clinical pathologist. In some embodiments, the biological sample is subjected to laboratory diagnostic tests (such as immunohistochemical assays or array CGH) to confirm that the biological sample is diseased or non-diseased and is of the assumed sample type (e.g., the tissue, biological fluid, cell type, cell line, cancer type etc.).

[0259] A biological sample can be a control biological sample obtained from a control subject. The control subject can be, for example, a normal subject that does not have a given cancer. A control biological sample can be or can comprise a sample that is healthy or normal. A control biological sample can be from a second/different type of cancer (for example, pancreatic cancer can be a control for multiple myeloma, and vice versa). A control biological sample can be or can comprise a sample from a tissue that is healthy or normal. A tissue that is healthy or normal can lack a specific pathological diagnosis (e.g., disease diagnosis). For example, the tissue that is healthy or normal can lack a cancer diagnosis. A control biological sample can be used for comparison, for example, in a process of determining a level of expression of a receptor that is associated with uptake of a ctDNA, polynucleotide, transposable element, or synthetic delivery system. The control biological sample can be used for determining whether uptake is specific for a given cancer type or cell type, for example.

[0260] In some embodiments, receptors or nucleic acid constructs of the present disclosure can be used for diagnostic and monitoring purposes in various chronic, infectious or inherited (e.g., genetic) diseases, including cancer and certain disorders related to, for example, blood cells (e.g., anemia, thalassemia, hemophilia, or platelet disorders). In some cases, the presence or expression level of a receptor and/or nucleic acid sequence as disclosed herein can be used as a biomarker for a particular disease or condition, or can be used to monitor response to a particular therapeutic intervention (e.g., chemotherapy, targeted therapy, immunotherapy, or cell and gene therapy). In other instances, a receptor, synthetic delivery system, or polynucleotide disclosed herein can be used as a diagnostic. For example, the integration of a polynucleotide or a part thereof into a genome of a cell can be used as a measurement or marker to determine the degree of integration of a cargo nucleic acid sequence (e.g., a therapeutic gene sequence) into a genome. In other cases, cell targeting and genomic integration of a polynucleotide (or delivery system) described herein can be used as a marker for a particular biological effect. In an example, the degree of uptake or genomic integration of a cargo, polynucleotide, or part thereof can be a marker or measurement for a therapeutic effect, e.g., cell killing.

### Therapeutic Agent Administration

[0261] Methods disclosed herein can comprise administering a therapeutic agent to a subject. The subject can be a subject in need thereof, for example, that has a condition to be treated. A therapeutic agent administered to the subject can be or can comprise a synthetic delivery system disclosed herein, e.g., for delivery of a cargo. A therapeutic agent administered to the subject can be or can comprise an antagonist, e.g., of a receptor associated with uptake of ctDNA.

[0262] The therapeutic agent (e.g., synthetic delivery system or antagonist) can be administered to a subject based on a level of expression of a receptor associated with uptake of ctDNA. For example, if the subject expresses the receptor associated with uptake of ctDNA (e.g., at a detectable level, or at least at a level associated with uptake of ctDNA), the therapeutic agent can be administered to the subject. Accordingly, an assay can be performed on a biological sample from the subject to determine whether the biological sample exhibits expression of the receptor (e.g., at a detectable level, or at least at a level associated with uptake of ctDNA). The assay can be an assay disclosed herein for determining the expression level of the receptor, for example, an immunohistochemistry, ELISA, multiplex immunoassay, mass spectrometry (e.g., targeted or untargeted), flow cytometry, fluorescence microscopy, quantitative PCR (e.g., quantitative reverse transcriptase real time PCR), digital PCR, or RNA sequencing assay on a biological sample.

[0263] In some embodiments, a subject is selected for administration of the therapeutic agent if the biological sample exhibits expression of the receptor at a detectable level. In some embodiments, a subject is selected for administration of the therapeutic agent if the biological sample exhibits expression of the receptor at least at a level associated with uptake of ctDNA. In some embodiments, a subject is not selected for administration of the therapeutic agent if the biological sample does not exhibit expression of the receptor at a detectable level. In some embodiments, a subject is not selected for administration of the therapeutic agent if the biological sample exhibits expression of the receptor below a level associated with uptake of ctDNA. The level of expression of the receptor can be used in conjunction with other data or criteria for determining whether to administer the therapeutic agent to the subject, for example, typing, staging, mutational burden, receptor expression, drug resistance/sensitivity, etc. of the cancer.

[0264] In some embodiments, methods of the disclosure comprise identifying a suitable therapeutic agent that can benefit a subject in need thereof. In some embodiments, methods of the disclosure comprise identifying a therapeutic agent that is unlikely to benefit a subject in need thereof.

[0265] Non-limiting examples of therapeutic agents that can be administered to a subject include vaccines (e.g., mRNA vaccines), AKT inhibitors, alkylating agents, anti-angiogenic agents, antibiotic agents, antifolates, anti-hormone therapies, anti-inflammatory agents, antimetabolites, anti-VEGF agents, apoptosis promoting agents, aromatase inhibitors, ATM regulators, biologic agents, BRAF inhibitors, BTK inhibitors, CAR-T cells, CAR-NK cells, CDK inhibitors, cell growth arrest inducing-agents, cell therapies, chemotherapy, cytokine therapies, cytotoxic drugs, demethylating agents, differentiation-inducing agents, estrogen receptor antagonists, gene therapy agents, growth factor inhibitors, growth factor receptor inhibitors, HDAC inhibitors, heat shock protein inhibitors, hematopoietic stem cell transplantation (HSCT), hormones, hydrazine, immune checkpoint inhibitors, immumomodulators, immunosuppressants, kinase inhibitors, KRAS inhibitors, matrix metalloproteinase inhibitors, MEK inhibitors, mitotic inhibitors, mTOR inhibitors, multi-specific (e.g., bispecific) immune cell engagers, multi-specific (e.g., bispecific) killer cell engagers, multi-specific (e.g., bispecific) T cell engagers, nitrogen mustards, oncolytic viruses, oxazaphosphorines, p53 reactivating agents, plant alkaloids, platinum-based agents, proteasome inhibitors, purine analogs, purine antagonists, pyrimidine antagonists, radiation therapy, ribonucleotide reductase inhibitors, signal transduction inhibitors, RNA silencing (e.g., RNAi) agents, gene editing agents, a CRISPR/Cas systems or a component thereof, an RNA replacement therapy, a protein replacement therapy, a gene therapy, antibody drug conjugates, surgery, taxanes, therapeutic antibodies, topoisomerase inhibitors, transgenic T cells, tyrosine kinase inhibitors, and vinca alkaloids.

[0266] A therapeutic agent can be, for example, an anti-cancer therapeutic agent. Non-limiting examples of anti-cancer therapeutic agents include cancer vaccines (e.g., mRNA vaccines), AKT inhibitors, alkylating agents, anti-angiogenic agents, antibiotic agents, antifolates, anti-hormone therapies, anti-inflammatory agents, antimetabolites, anti-VEGF agents, apoptosis promoting agents, aromatase inhibitors, ATM regulators, biologic agents, BRAF inhibitors, BTK inhibitors, CAR-T cells, CAR-NK cells, CDK inhibitors, cell growth arrest inducing-agents, cell therapies, chemotherapy, cytokine therapies, cytotoxic drugs, demethylating agents, differentiation-inducing agents, estrogen receptor antagonists, gene therapy agents, growth factor inhibitors, growth factor receptor inhibitors, HDAC inhibitors, heat shock protein inhibitors, hematopoietic stem cell transplantation (HSCT), hormones, hydrazine, immune checkpoint inhibitors, immumomodulators, kinase inhibitor, KRAS inhibitors, matrix metalloproteinase inhibitors, MEK inhibitors, mitotic inhibitors, mTOR inhibitors, multi-specific (e.g., bispecific) immune cell engagers, multi-specific (e.g., bispecific) killer cell engagers, multi-specific (e.g., bispecific) T cell engagers, nitrogen mustards, oncolytic viruses, oxazaphosphorines, p53 reactivating agents, plant alkaloids, platinum-based agents, proteasome inhibitors, purine analogs, purine antagonists, pyrimidine antagonists, radiation therapy, ribonucleotide reductase inhibitors, signal transduction inhibitors, RNA silencing (e.g., RNAi) agents, gene editing agents, a CRISPR/Cas systems or a component thereof, an RNA replacement therapy, a protein replacement therapy, a gene therapy, antibody drug conjugates, surgery, taxanes, therapeutic antibodies, topoisomerase inhibitors, transgenic T cells, tyrosine kinase inhibitors, and vinca alkaloids.

[0267] A therapeutic agent can be a drug. A therapeutic agent can be a non-cancer therapeutic, for example, a therapeutic for a metabolic disease, autoimmune disease, neurological disease, or degenerative disease. A therapeutic agent can be, for example, a vaccine (e.g., cancer vaccine), a drug, an immunotherapy, an immune checkpoint inhibitor, a kinase inhibitor, a small molecule, a chemotherapeutic agent, a radiotherapy, a biologic, or any combination thereof.

[0268] A therapeutic agent can modulate (e.g., increase or decrease) activity of a target gene (e.g., an aberrantly expressed gene), or a product encoded by the target gene, such as a protein or RNA. A therapeutic agent can modulate (e.g., increase or decrease) expression of a target gene (e.g., an aberrantly expressed gene). A therapeutic agent can modulate (e.g., increase or decrease) activity of a ligand or receptor of a target gene (e.g., an aberrantly expressed gene). In some embodiments, a therapeutic agent can alter the gene product of an aberrantly-expressed gene, e.g., by targeting the gene product, the transcript of the gene, or epigenetic factors that influence a property of the gene (e.g., expression). Non-limiting examples include targeting the protein that the gene encodes, reducing expression levels of the gene using gene therapy or RNAi, and using RNA vaccines to establish an immune response.

[0269] Methods of the disclosure can be used to identify a therapeutic agent that can be used in the treatment of a disease or condition, such as a cancer. Methods of the disclosure can be used to treat a condition in a subject in need thereof, such as a cancer. The cancer can be a solid tumor or a liquid cancer, e.g., leukemia or lymphoma. In some embodiments, the cancer is a solid tumor. In some embodiments, the cancer is a hematological cancer, for example, a B cell cancer, such as multiple myeloma. In some embodiments, the cancer is a pancreatic cancer. In some embodiments, the cancer is colon cancer or colorectal cancer. In some embodiments, the cancer is a lung cancer.

[0270] In some embodiments, the cancer comprises bladder cancer, brain cancer (e.g., astrocytoma, glioblastoma, meningioma, or oligodendroglioma), breast cancer (e.g., ER+, PR+, HER2+, or triple-negative breast cancer), bone cancer, cervical cancer, colon cancer, colorectal cancer, esophageal cancer, head and neck cancer, kidney cancer, liver cancer, lung cancer, medullary thyroid cancer, mouth cancer, nose cancer, ovarian cancer (e.g., mucinous, endometrioid, clear cell, or undifferentiated), pancreatic cancer, renal cancer, skin cancer, stomach cancer, throat cancer, thyroid cancer, or uterus cancer. In some embodiments, the cancer comprises bladder cancer, brain cancer, breast cancer, colon cancer, colorectal cancer, lung cancer, or ovarian cancer. In some embodiments, the cancer is lung cancer. In some embodiments, the cancer is brain cancer. In some embodiments, the cancer is breast cancer, e.g., triple-negative breast cancer. In some embodiments, the cancer is ovarian cancer. In some embodiments, the cancer is bladder cancer.

[0271] In some embodiments, the cancer is a carcinoma. In some embodiments, the cancer is a sarcoma. In some embodiments, the cancer is an adenoma. In some embodiments, the cancer is an adenocarcinoma.

[0272] In some embodiments, the cancer is of unknown primary tissue. In some embodiments, a method disclosed herein is used to identify the primary tissue type. In some embodiments, the cancer is a neuroendocrine tumor.

[0273] A subject (e.g., treated using a method disclosed herein, and/or the source of a biological sample) can be a mammal. In some embodiments the subject is a human. In some embodiments, the subject is a mouse, a rat, a cat, a dog, a rabbit, a cow, a horse, a goat, a monkey, a cynomolgus monkey, or a lamb. In some embodiments, the subject is a primate. In some embodiments, the subject is a non-human primate. In some embodiments, the subject is a non-rodent subject. A subject can be a female subject. A subject can be a male subject.

[0274] In practicing the methods of treatment or use provided herein, therapeutically-effective amounts of the therapeutic agents described herein can be administered in pharmaceutical compositions to a subject having a disease or condition to be treated. A therapeutically-effective amount can vary widely depending on the severity of the disease, the age and relative health of the subject, the potency of the compounds used, and other factors.

[0275] Disclosed herein, in some embodiments, is a method of delivering a cargo to a target cell. The method can comprise contacting a target cell or a receptor on the target cell with a synthetic delivery system disclosed herein that comprises a polynucleotide.

[0276] In some embodiments, a method of delivering a cargo disclosed herein utilizing a synthetic delivery system can be used to treat cancer, an inflammatory disease, or an autoimmune disease. In some embodiments, a method of delivering a cargo disclosed herein utilizing a synthetic delivery system can be used to administer a vaccine.

[0277] A treatment can comprise administering to a subject a synthetic delivery system or antagonist. A synthetic delivery system or antagonist disclosed herein can be administered to a subject intravenously, subcutaneously, intramuscularly, intranasally, by inhalation, intrademally, dermally, topically, orally, sublingually, intrathecally, transdermally, intranasally, intracerebrally, intraspinally, intraarticularly, ophthalmically, rectally, via a peritoneal route, or directly into the brain, e.g., via an intracerebral ventricle route. A synthetic delivery system or antagonist can be administered via absorption through epithelial or mucocutaneous linings (e.g., oral mucosa, rectal and intestinal mucosa).

[0278] A synthetic delivery system, antagonist, or therapeutic agent described herein can be administered before, during, or after the occurrence of a disease or condition, and the timing of administering a composition containing the synthetic delivery system, antagonist, or therapeutic agent can vary. For example, the composition can be used as a prophylactic and can be administered continuously to subjects with a propensity to conditions or diseases in order to lessen a likelihood of the occurrence of the disease or condition. The composition can be administered to a subject already suffering from a disease or condition, in an amount sufficient to cure or at least partially arrest the symptoms of the disease or condition, or to cure, heal, improve, or ameliorate the condition. The composition can be administered to a subject during or as soon as practical after the onset of the symptoms.

[0279] Multiple synthetic delivery systems, antagonists, or therapeutic agents disclosed herein can be administered in any order or simultaneously. If simultaneously, the multiple synthetic delivery systems, antagonists, or therapeutic agents can be provided in a single, unified form, or in multiple forms, for example, as multiple separate injections or infusions. The synthetic delivery systems, antagonists, or therapeutic agents can be packed together or separately, in a single package or in a plurality of packages. One or all of the synthetic delivery systems, antagonists, or therapeutic agents can be given in multiple doses.

[0280] The methods and compositions of the present disclosure may be useful for altering the phenotype of a target cell and/or a target cell population. In some cases, phenotypic alteration of target cells in a subject can improve the therapeutic and/or clinical response of the subject to a therapeutic intervention. In some embodiments, methods and compositions of the disclosure can be used to alter sensitivity of a target cell or target cell population to a drug, for example, increase sensitivity of cancer cells to an anti-cancer drug, or limiting or reducing a decrease in sensitivity of cancer cells to the anti-cancer drug.

[0281] A composition or method of the present disclosure can be used to elicit an immune response in a subject, e.g., upon administration of a synthetic delivery system. For example, an immune response can be elicited by administering nucleic acid constructs that comprise a cargo nucleic acid sequence coding for one or more antigenic or immunogenic peptides or proteins, and such immunogenic peptides or proteins can elicit an immune response in the subject upon expression. A synthetic delivery system elicits an immune response based on the presence of cytosolic nucleic acid (e.g., DNA). In some embodiments, a synthetic delivery system elicits an immune response based on expression of a transgene from a nucleic acid cargo, for example, encoding a cytokine.

[0282] In some embodiments, the high specificity and/or efficiency by which a synthetic delivery system disclosed herein delivers to targets (e.g., multiple myeloma cells) cells while largely sparing non-target cells (e.g., other bone marrow cells) supports use of synthetic delivery systems disclosed herein as therapeutic vectors.

[0283] In some embodiments, a synthetic delivery system is used to visualize and/or track a disease or condition (e.g., cancer) in vivo, e.g., by delivering a chemical dye (e.g., a fluorescent dye) or a radioactive isotope to one or more cells associated with the disease or conditions. In another example, tumor cells can be visualized and tracked in vivo by delivering, for example, a chemical dye (e.g., a fluorescent dye), a radioactive isotope, or contrast agents to the tumor site(s) (e.g., primary tumor site and metastatic sites) by using a synthetic delivery system disclosed herein.

[0284] A synthetic delivery system, polynucleotide, or pharmaceutical composition can be administered in combination with one or more other therapeutic agents, for example, small molecule drugs, immunotherapeutic agents (e.g., immune check point blocker), therapeutic antibodies, or any other therapeutic agent disclosed herein.

Identification of Receptors for ctDNA

[0285] Various assays can be used to demonstrate a role of a receptor in cellular binding, uptake, nuclear localization, and/or genomic integration of a ctDNA, synthetic delivery system, polynucleotide, or cargo.

[0286] The disclosure provides methods of identifying a receptor or fragment thereof that binds to and/or mediates uptake of a ctDNA, synthetic delivery system, polynucleotide, or cargo by a target cell. The method can comprise contacting cell lysate to the ctDNA, a synthetic delivery system, or polynucleotide that comprises ctDNA or a derivative thereof (e.g., recognition sequence). The cell lysate can be generated from a population of target cells. The ctDNA or synthetic delivery system that is bound to a receptor can be isolated, for example, by a pulldown assay. The receptor or fragment thereof that is bound to the ctDNA or synthetic delivery system can be identified, for example, by mass spectrometry. The ctDNA or synthetic delivery system can be labelled or tagged to facilitate isolation (e.g., pulldown) of the bound receptor or fragment thereof. For example, the ctDNA or synthetic delivery system can be biotinylated, or can comprise a tag sequence that is bound by a reagent, such as an antibody.

[0287] Knockout, knockdown, or disruption of a gene that encodes a receptor or a component thereof can be used to demonstrate a role of the receptor in cellular binding, uptake, nuclear localization, and/or genomic integration of a cargo, synthetic delivery system, ctDNA, or polynucleotide. Knockout can comprise removing all or part of the gene that encodes the receptor, for example, using a nuclease system with or without a repair template (e.g., CRISPR/Cas mediated cleavage with provision of a template for homology-directed repair). Knockout can comprise disruption of the gene, for example, using a transposon/transposase system or a CRISPR/Cas system. Knockdown can comprise targeting an RNA transcript of a gene encoding the receptor or component thereof for degradation, for example, using an siRNA or a targeted endonuclease system that degrades the RNA transcript.

[0288] In some embodiments, knockout, knockdown, or disruption of a gene that encodes a receptor or a component thereof reduces binding of the cargo, synthetic delivery system, ctDNA, or polynucleotide to the target cell by at least about 5%, at least about 10%, at least about 15%, at least about 20%, at least about 30%, at least about 40%, at least about 50%, at least about 60%, at least about 70%, at least about 80%, at least about 90%, at least about 95%, or at least about 99%, for example, as determined by a confocal fluorescence microscopy assay or an ALPHA assay.

[0289] In some embodiments, knockout, knockdown, or disruption of a gene that encodes a receptor or a component thereof reduces uptake of the cargo, synthetic delivery system, ctDNA, or polynucleotide by the target cell by at least about 5%, at least about 10%, at least about 15%, at least about 20%, at least about 30%, at least about 40%, at least about 50%, at least about 60%, at least about 70%, at least about 80%, at least about 90%, at least about 95%, or at least about 99%, for example, as determined by a confocal fluorescence microscopy assay.

[0290] In some embodiments, knockout, knockdown, or disruption of a gene that encodes a receptor or a component thereof reduces nuclear localization of the cargo, synthetic delivery system, ctDNA, or polynucleotide by the target cell by at least about 5%, at least about 10%, at least about 15%, at least about 20%, at least about 30%, at least about 40%, at least about 50%, at least about 60%, at least about 70%, at least about 80%, at least about 90%, at least about 95%, or at least about 99%, for example, as determined by a confocal fluorescence microscopy assay.

[0291] In some embodiments, knockout, knockdown, or disruption of a gene that encodes a receptor or a component thereof reduces integration of the cargo, synthetic delivery system, ctDNA, or polynucleotide into the target cell's genome by at least about 5%, at least about 10%, at least about 15%, at least about 20%, at least about 30%, at least about 40%, at least about 50%, at least about 60%, at least about 70%, at least about 80%, at least about 90%, at least about 95%, or at least about 99% for example, as determined by a metaphase chromosome spread assay or sequencing.

[0292] The degree of sequence identity between two sequences can be determined, for example, by comparing the two sequences using computer programs commonly employed for this purpose, such as global or local alignment algorithms. Non-limiting examples include BLASTp, BLASTn, Clustal W, MAFFT, Clustal Omega, AlignMe, Praline, GAP, BESTFIT, or another suitable method or algorithm. A Needleman and Wunsch global alignment algorithm can be used to align two sequences over their entire length, maximizing the number of matches and minimizes the number of gaps. Default settings can be used.

### Embodiments

[0293] Embodiment 1. A method of reducing uptake of circulating tumor-derived DNA (ctDNA) by target cells in a subject, the method comprising administering to the subject an antagonist of a receptor that is associated with cellular uptake of the ctDNA, thereby reducing the uptake of the ctDNA by the target cells in the subject.

[0294] Embodiment 2. The method of embodiment 1, wherein the antagonist comprises an antibody or an antigen-binding fragment thereof.

[0295] Embodiment 3. The method of embodiment 1 or embodiment 2, wherein the antagonist comprises an IgG antibody.

[0296] Embodiment 4. The method of embodiment 1 or embodiment 2, wherein the antagonist comprises a polypeptide.

[0297] Embodiment 5. The method of embodiment 1, wherein the antagonist comprises a ligand of the receptor.

[0298] Embodiment 6. The method of embodiment 1, wherein the antagonist comprises a small molecule antagonist of the receptor.

[0299] Embodiment 7. The method of embodiment 1, wherein the antagonist comprises a polynucleotide.

[0300] Embodiment 8. The method of embodiment 1, wherein the antagonist comprises a polynucleotide, wherein the polynucleotide comprises a transposable element.

[0301] Embodiment 9. The method of embodiment 1, 7, or 8, wherein the antagonist comprises DNA.

[0302] Embodiment 10. The method of any one of embodiments 1 and 7-9, wherein the antagonist comprises double stranded DNA.

[0303] Embodiment 11. The method of any one of embodiments 1 and 7-10, wherein the antagonist comprises a nucleic acid sequence identified in circulating tumor DNA (ctDNA), or a derivative thereof.

[0304] Embodiment 12. The method of any one of embodiments 1-11, wherein the receptor comprises an armadillo-like protein.

[0305] Embodiment 13. The method of any one of embodiments 1-12, wherein the receptor comprises a p120(ctn)/plakophilin subfamily member.

[0306] Embodiment 14. The method of any one of embodiments 1-11, wherein the receptor comprises an APP (amyloid precursor protein) family member.

[0307] Embodiment 15. The method of any one of embodiments 1-11, wherein the receptor comprises an MHC protein.

[0308] Embodiment 16. The method of any one of embodiments 1-11, wherein the receptor comprises a GPCR.

[0309] Embodiment 17. The method of any one of embodiments 1-11, wherein the receptor comprises an adhesion protein.

[0310] Embodiment 18. The method of any one of embodiments 1-11, wherein the receptor comprises a tyrosine phosphatase.

[0311] Embodiment 19. The method of any one of embodiments 1-11, wherein the receptor comprises an integrin.

[0312] Embodiment 20. The method of any one of embodiments 1-11, wherein the receptor comprises an ion channel.

[0313] Embodiment 21. The method of any one of embodiments 1-11, wherein the receptor comprises a mineral transporter.

[0314] Embodiment 22. The method of any one of embodiments 1-11, wherein the receptor comprises a nutrient transporter.

[0315] Embodiment 23. The method of any one of embodiments 1-11, wherein the receptor comprises an ATPase.

[0316] Embodiment 24. The method of any one of embodiments 1-11, wherein the receptor comprises APLP2.

[0317] Embodiment 25. The method of any one of embodiments 1-11, wherein the receptor comprises PKP4.

[0318] Embodiment 26. The method of any one of embodiments 1-11, wherein the receptor comprises HLA-A.

[0319] Embodiment 27. The method of any one of embodiments 1-11, wherein the receptor comprises CD41.

[0320] Embodiment 28. The method of any one of embodiments 1-11, wherein the receptor comprises CD97.

[0321] Embodiment 29. The method of any one of embodiments 1-11, wherein the receptor comprises Integrin αVβ5.

[0322] Embodiment 30. The method of any one of embodiments 1-11, wherein the receptor comprises PI4K2A.

[0323] Embodiment 31. The method of any one of embodiments 1-11, wherein the receptor comprises TMEM120A.

[0324] Embodiment 32. The method of any one of embodiments 1-11, wherein the receptor comprises PTK7A.

[0325] Embodiment 33. The method of any one of embodiments 1-11, wherein the receptor comprises Ceruloplasmin.

[0326] Embodiment 34. The method of any one of embodiments 1-11, wherein the receptor comprises PTPRF.

[0327] Embodiment 35. The method of any one of embodiments 1-11, wherein the receptor comprises SLC16A1.

[0328] Embodiment 36. The method of any one of embodiments 1-11, wherein the receptor comprises SLC7A5.

[0329] Embodiment 37. The method of any one of embodiments 1-11, wherein the receptor comprises ATP1BL.

[0330] Embodiment 38. The method of any one of embodiments 1-11, wherein the receptor comprises ATP2B4.

[0331] Embodiment 39. The method of any one of embodiments 1-11, wherein the receptor comprises P142A.

[0332] Embodiment 40. The method of any one of embodiments 1-39, wherein the target cells comprise cancer cells.

[0333] Embodiment 41. The method of any one of embodiments 1-40, wherein the target cells comprise leukocytes.

[0334] Embodiment 42. The method of any one of embodiments 1-41, wherein the target cells comprise lymphocytes.

[0335] Embodiment 43. The method of any one of embodiments 1-42, wherein the target cells comprise B lymphocytes.

[0336] Embodiment 44. The method of any one of embodiments 1-43, wherein the target cells comprise plasma cells.

[0337] Embodiment 45. The method of any one of embodiments 1-44, wherein the target cells comprise multiple myeloma cells.

[0338] Embodiment 46. The method of any one of embodiments 1-40, wherein the target cells comprise pancreatic cells.

[0339] Embodiment 47. The method of any one of embodiments 1-40, wherein the target cells comprise pancreatic cancer cells.

[0340] Embodiment 48. The method of any one of embodiments 1-40, wherein the target cells comprise gastrointestinal cells.

[0341] Embodiment 49. The method of any one of embodiments 1-40, wherein the target cells comprise colorectal cancer cells.

[0342] Embodiment 50. The method of any one of embodiments 1-49, wherein the target cells are cancer cells and method reduces development of resistance of the cancer cells to a therapeutic agent.

[0343] Embodiment 51. The method of any one of embodiments 1-50, wherein the subject has a cancer and the method reduces development of resistance of the cancer to a therapeutic agent.

[0344] Embodiment 52. The method of any one of embodiments 1-51, wherein the subject has a cancer and the method reduces metastasis of the cancer.

[0345] Embodiment 53. The method of any one of embodiments 1-52, wherein the subject has a cancer and the method reduces progression of the cancer.

[0346] Embodiment 54. The method of any one of embodiments 1-49, wherein the target cells are cancer cells and method delays development of resistance of the cancer cells to a therapeutic agent.

[0347] Embodiment 55. The method of any one of embodiments 1-49, wherein the subject has a cancer and the method delays development of resistance of the cancer to a therapeutic agent.

[0348] Embodiment 56. The method of any one of embodiments 1-49, wherein the subject has a cancer and the method delays metastasis of the cancer.

[0349] Embodiment 57. The method of any one of embodiments 1-49, wherein the subject has a cancer and the method delays progression of the cancer.

[0350] Embodiment 58. A method of reducing uptake of circulating tumor-derived DNA (ctDNA) by target cells, the method comprising contacting the target cells with an antagonist of a receptor that is associated with uptake of the ctDNA, thereby reducing the uptake of the ctDNA by the target cells.

[0351] Embodiment 59. The method of embodiment 58, wherein the uptake of the ctDNA by the target cells is reduced by at least 5% as determined by a confocal fluorescence microscopy assay.

[0352] Embodiment 60. The method of embodiment 58 or embodiment 59, wherein the target cells are exposed to the antagonist at a concentration of at least 1 ng/mL.

[0353] Embodiment 61. The method of any one of embodiments 58-60, wherein the target cells are exposed to the antagonist at a concentration of about 1 g/mL.

[0354] Embodiment 62. The method of any one of embodiments 58-61, wherein the contacting is in vivo.

[0355] Embodiment 63. The method of any one of embodiments 58-61, wherein the contacting is in vitro or ex vivo.

[0356] Embodiment 64. The method of any one of embodiments 58-63, wherein the antagonist comprises an antibody or an antigen-binding fragment thereof.

[0357] Embodiment 65. The method of any one of embodiments 58-64, wherein the antagonist comprises an IgG antibody.

[0358] Embodiment 66. The method of any one of embodiments 58-63, wherein the antagonist comprises a polypeptide.

[0359] Embodiment 67. The method of any one of embodiments 58-63 and 66, wherein the antagonist comprises a ligand of the receptor.

[0360] Embodiment 68. The method of any one of embodiments 58-63, wherein the antagonist comprises a small molecule antagonist of the receptor.

[0361] Embodiment 69. The method of any one of embodiments 58-63, wherein the antagonist comprises a polynucleotide.

[0362] Embodiment 70. The method of any one of embodiments 58-63, wherein the antagonist comprises DNA.

[0363] Embodiment 71. The method of any one of embodiments 58-63, wherein the antagonist comprises double stranded DNA.

[0364] Embodiment 72. The method of any one of embodiments 58-63, wherein the antagonist comprises a nucleic acid sequence identified in circulating tumor DNA (ctDNA), or a derivative thereof.

[0365] Embodiment 73. The method of any one of embodiments 58-63 and 72, wherein the antagonist comprises a polynucleotide, wherein the polynucleotide comprises a transposable element.

[0366] Embodiment 74. The method of any one of embodiments 58-73, wherein the receptor comprises an armadillo-like protein.

[0367] Embodiment 75. The method of any one of embodiments 58-74, wherein the receptor comprises a p120(ctn)/plakophilin subfamily member.

[0368] Embodiment 76. The method of any one of embodiments 58-73, wherein the receptor comprises an APP (amyloid precursor protein) family member.

[0369] Embodiment 77. The method of any one of embodiments 58-73, wherein the receptor comprises an MHC protein.

[0370] Embodiment 78. The method of any one of embodiments 58-73, wherein the receptor comprises a GPCR.

[0371] Embodiment 79. The method of any one of embodiments 58-73, wherein the receptor comprises an adhesion protein.

[0372] Embodiment 80. The method of any one of embodiments 58-73, wherein the receptor comprises a tyrosine phosphatase.

[0373] Embodiment 81. The method of any one of embodiments 58-73, wherein the receptor comprises an integrin.

[0374] Embodiment 82. The method of any one of embodiments 58-73, wherein the receptor comprises an ion channel.

[0375] Embodiment 83. The method of any one of embodiments 58-73, wherein the receptor comprises a mineral transporter.

[0376] Embodiment 84. The method of any one of embodiments 58-73, wherein the receptor comprises a nutrient transporter.

[0377] Embodiment 85. The method of any one of embodiments 58-73, wherein the receptor comprises an ATPase.

[0378] Embodiment 86. The method of any one of embodiments 58-73, wherein the receptor comprises APLP2.

[0379] Embodiment 87. The method of any one of embodiments 58-73, wherein the receptor comprises PKP4.

[0380] Embodiment 88. The method of any one of embodiments 58-73, wherein the receptor comprises HLA-A.

[0381] Embodiment 89. The method of any one of embodiments 58-73, wherein the receptor comprises CD41.

[0382] Embodiment 90. The method of any one of embodiments 58-73, wherein the receptor comprises CD97.

[0383] Embodiment 91. The method of any one of embodiments 58-73, wherein the receptor comprises Integrin αVβ5.

[0384] Embodiment 92. The method of any one of embodiments 58-73, wherein the receptor comprises PI4K2A.

[0385] Embodiment 93. The method of any one of embodiments 58-73, wherein the receptor comprises TMEM120A.

[0386] Embodiment 94. The method of any one of embodiments 58-73, wherein the receptor comprises PTK7A.

[0387] Embodiment 95. The method of any one of embodiments 58-73, wherein the receptor comprises Ceruloplasmin.

[0388] Embodiment 96. The method of any one of embodiments 58-73, wherein the receptor comprises PTPRF.

[0389] Embodiment 97. The method of any one of embodiments 58-73, wherein the receptor comprises SLC16A1.

[0390] Embodiment 98. The method of any one of embodiments 58-73, wherein the receptor comprises SLC7A5.

[0391] Embodiment 99. The method of any one of embodiments 58-73, wherein the receptor comprises ATP1B1.

[0392] Embodiment 100. The method of any one of embodiments 58-73, wherein the receptor comprises ATP2B4.

[0393] Embodiment 101. The method of any one of embodiments 58-73, wherein the receptor comprises P142A.

[0394] Embodiment 102. The method of any one of embodiments 58-101, wherein the target cells comprise cancer cells.

[0395] Embodiment 103. The method of any one of embodiments 58-102, wherein the target cells comprise leukocytes.

[0396] Embodiment 104. The method of any one of embodiments 58-103, wherein the target cells comprise lymphocytes.

[0397] Embodiment 105. The method of any one of embodiments 58-104, wherein the target cells comprise B lymphocytes.

[0398] Embodiment 106. The method of any one of embodiments 58-105, wherein the target cells comprise plasma cells.

[0399] Embodiment 107. The method of any one of embodiments 58-106, wherein the target cells comprise multiple myeloma cells.

[0400] Embodiment 108. The method of any one of embodiments 58-102, wherein the target cells comprise pancreatic cells.

[0401] Embodiment 109. The method of any one of embodiments 58-102, wherein the target cells comprise pancreatic cancer cells.

[0402] Embodiment 110. The method of any one of embodiments 58-102, wherein the target cells comprise gastrointestinal cells.

[0403] Embodiment 111. The method of any one of embodiments 58-102, wherein the target cells comprise colorectal cancer cells.

[0404] Embodiment 112. A method comprising determining that a biological sample from a subject expresses a receptor that is associated with uptake of ctDNA at a level that is associated with the uptake of the ctDNA.

[0405] Embodiment 113. The method of embodiment 112, further comprising administering to the subject a therapeutically-effective amount of a therapeutic agent, wherein the administering is based at least in part on the determining that the biological sample from the subject expresses the receptor that is associated with the uptake of the ctDNA at the level that is associated with the uptake of the ctDNA.

[0406] Embodiment 114. The method of embodiment 112 or embodiment 113, wherein the determining comprises contacting the biological sample with an agent that binds to the receptor.

[0407] Embodiment 115. The method of embodiment 114, wherein the agent that binds to the receptor comprises an antibody or an antigen-binding fragment thereof.

[0408] Embodiment 116. The method of any one of embodiments 112-115, wherein the determining comprises an immunohistochemistry assay.

[0409] Embodiment 117. The method of any one of embodiments 112-116, wherein the determining comprises quantifying a level the receptor at protein level.

[0410] Embodiment 118. The method of embodiment 112 or embodiment 113, wherein the determining comprises quantifying a level of an mRNA that encodes the receptor.

[0411] Embodiment 119. The method of embodiment 112 or embodiment 113, wherein the determining comprises contacting the biological sample with an antibody that binds to the receptor and contacting the biological sample with a detection agent that induces a detectable signal based on a presence of the antibody bound to the receptor.

[0412] Embodiment 120. The method of any one of embodiments 112-119, wherein the receptor comprises an armadillo-like protein.

[0413] Embodiment 121. The method of any one of embodiments 112-120, wherein the receptor comprises a p120(ctn)/plakophilin subfamily member.

[0414] Embodiment 122. The method of any one of embodiments 112-119, wherein the receptor comprises an APP (amyloid precursor protein) family member.

[0415] Embodiment 123. The method of any one of embodiments 112-119, wherein the receptor comprises an MHC protein.

[0416] Embodiment 124. The method of any one of embodiments 112-119 wherein the receptor comprises a GPCR.

[0417] Embodiment 125. The method of any one of embodiments 112-119, wherein the receptor comprises an adhesion protein.

[0418] Embodiment 126. The method of any one of embodiments 112-119, wherein the receptor comprises a tyrosine phosphatase.

[0419] Embodiment 127. The method of any one of embodiments 112-119, wherein the receptor comprises an integrin.

[0420] Embodiment 128. The method of any one of embodiments 112-119, wherein the receptor comprises an ion channel.

[0421] Embodiment 129. The method of any one of embodiments 112-119, wherein the receptor comprises a mineral transporter.

[0422] Embodiment 130. The method of any one of embodiments 112-119, wherein the receptor comprises a nutrient transporter.

[0423] Embodiment 131. The method of any one of embodiments 112-119, wherein the receptor comprises an ATPase.

[0424] Embodiment 132. The method of any one of embodiments 112-119, wherein the receptor comprises APLP2.

[0425] Embodiment 133. The method of any one of embodiments 112-119, wherein the receptor comprises PKP4.

[0426] Embodiment 134. The method of any one of embodiments 112-119, wherein the receptor comprises HLA-A.

[0427] Embodiment 135. The method of any one of embodiments 112-119, wherein the receptor comprises CD41.

[0428] Embodiment 136. The method of any one of embodiments 112-119, wherein the receptor comprises CD97.

[0429] Embodiment 137. The method of any one of embodiments 112-119, wherein the receptor comprises Integrin αVβ5.

[0430] Embodiment 138. The method of any one of embodiments 112-119, wherein the receptor comprises PI4K2A.

[0431] Embodiment 139. The method of any one of embodiments 112-119, wherein the receptor comprises TMEM120A.

[0432] Embodiment 140. The method of any one of embodiments 112-119, wherein the receptor comprises PTK7A.

[0433] Embodiment 141. The method of any one of embodiments 112-119, wherein the receptor comprises Ceruloplasmin.

[0434] Embodiment 142. The method of any one of embodiments 112-119, wherein the receptor comprises PTPRF.

[0435] Embodiment 143. The method of any one of embodiments 112-119, wherein the receptor comprises SLC16A1.

[0436] Embodiment 144. The method of any one of embodiments 112-119, wherein the receptor comprises SLC7A5.

[0437] Embodiment 145. The method of any one of embodiments 112-119, wherein the receptor comprises ATP1B1.

[0438] Embodiment 146. The method of any one of embodiments 112-119, wherein the receptor comprises ATP2B4.

[0439] Embodiment 147. The method of any one of embodiments 112-119, wherein the receptor comprises P142A.

[0440] Embodiment 148. A method of treating a condition in a subject in need thereof, the method comprising administering a therapeutically-effective amount of a therapeutic agent to the subject, wherein the administering is based at least in part on a result of an assay performed on a biological sample from the subject, wherein the assay determined that a receptor associated with uptake of ctDNA is expressed in the biological sample at a level that is associated with the uptake of the ctDNA.

[0441] Embodiment 149. The method of embodiment 148, wherein the assay comprises contacting the biological sample with an agent that binds to the receptor.

[0442] Embodiment 150. The method of embodiment 149, wherein the agent that binds to the receptor comprises an antibody or an antigen-binding fragment thereof.

[0443] Embodiment 151. The method of any one of embodiments 148-150, wherein the assay comprises an immunohistochemistry assay.

[0444] Embodiment 152. The method of any one of embodiments 148-150, wherein the assay comprises quantifying a level of the receptor at protein level.

[0445] Embodiment 153. The method of embodiment 148, wherein the assay comprises quantifying a level of an mRNA that encodes the receptor.

[0446] Embodiment 154. The method of embodiment 148, wherein the assay comprises contacting the biological sample with an antibody that binds to the receptor and contacting the biological sample with a detection agent that induces a detectable signal based on the presence of the antibody bound to the receptor.

[0447] Embodiment 155. The method of any one of embodiments 148-154, wherein the receptor comprises an armadillo-like protein.

[0448] Embodiment 156. The method of any one of embodiments 148-155, wherein the receptor comprises a p120(ctn)/plakophilin subfamily member.

[0449] Embodiment 157. The method of any one of embodiments 148-154, wherein the receptor comprises an APP (amyloid precursor protein) family member.

[0450] Embodiment 158. The method of any one of embodiments 148-154, wherein the receptor comprises an MHC protein.

[0451] Embodiment 159. The method of any one of embodiments 148-154, wherein the receptor comprises a GPCR.

[0452] Embodiment 160. The method of any one of embodiments 148-154, wherein the receptor comprises an adhesion protein.

[0453] Embodiment 161. The method of any one of embodiments 148-154, wherein the receptor comprises a tyrosine phosphatase.

[0454] Embodiment 162. The method of any one of embodiments 148-154, wherein the receptor comprises an integrin.

[0455] Embodiment 163. The method of any one of embodiments 148-154, wherein the receptor comprises an ion channel.

[0456] Embodiment 164. The method of any one of embodiments 148-154, wherein the receptor comprises a mineral transporter.

[0457] Embodiment 165. The method of any one of embodiments 148-154, wherein the receptor comprises a nutrient transporter.

[0458] Embodiment 166. The method of any one of embodiments 148-154, wherein the receptor comprises an ATPase.

[0459] Embodiment 167. The method of any one of embodiments 148-154, wherein the receptor comprises APLP2.

[0460] Embodiment 168. The method of any one of embodiments 148-154, wherein the receptor comprises PKP4.

[0461] Embodiment 169. The method of any one of embodiments 148-154, wherein the receptor comprises HLA-A.

[0462] Embodiment 170. The method of any one of embodiments 148-154, wherein the receptor comprises CD41.

[0463] Embodiment 171. The method of any one of embodiments 148-154, wherein the receptor comprises CD97.

[0464] Embodiment 172. The method of any one of embodiments 148-154, wherein the receptor comprises Integrin αVβ5.

[0465] Embodiment 173. The method of any one of embodiments 148-154, wherein the receptor comprises PI4K2A.

[0466] Embodiment 174. The method of any one of embodiments 148-154, wherein the receptor comprises TMEM120A.

[0467] Embodiment 175. The method of any one of embodiments 148-154, wherein the receptor comprises PTK7A.

[0468] Embodiment 176. The method of any one of embodiments 148-154, wherein the receptor comprises Ceruloplasmin.

[0469] Embodiment 177. The method of any one of embodiments 148-154, wherein the receptor comprises PTPRF.

[0470] Embodiment 178. The method of any one of embodiments 148-154, wherein the receptor comprises SLC16A1.

[0471] Embodiment 179. The method of any one of embodiments 148-154, wherein the receptor comprises SLC7A5.

[0472] Embodiment 180. The method of any one of embodiments 148-154, wherein the receptor comprises APLP2.

[0473] Embodiment 181. The method of any one of embodiments 148-154, wherein the receptor comprises ATP1B1.

[0474] Embodiment 182. The method of any one of embodiments 148-154, wherein the receptor comprises ATP2B4.

[0475] Embodiment 183. The method of any one of embodiments 148-154, wherein the receptor comprises P142A.

[0476] Embodiment 184. The method of any one of embodiments 148-183, wherein the therapeutic agent comprises an anti-cancer therapeutic.

[0477] Embodiment 185. The method of any one of embodiments 148-183, wherein the therapeutic agent comprises a cytotoxic anti-cancer drug.

[0478] Embodiment 186. The method of any one of embodiments 148-183, wherein the therapeutic agent comprises an antagonist of the receptor.

[0479] Embodiment 187. The method of any one of embodiments 148-185, wherein the therapeutic agent comprises a synthetic delivery system.

[0480] Embodiment 188. The method of embodiment 187, wherein the synthetic delivery system comprises a polynucleotide.

[0481] Embodiment 189. The method of embodiment 188, wherein the polynucleotide induces uptake of the synthetic delivery system or a component thereof by a target cell.

[0482] Embodiment 190. The method of embodiment 188 or embodiment 189, wherein the polynucleotide comprises a nucleic acid sequence identified in circulating tumor DNA (ctDNA) or a derivative thereof.

[0483] Embodiment 191. The method of any one of embodiments 188-190, wherein the polynucleotide comprises double stranded DNA.

[0484] Embodiment 192. The method of any one of embodiments 188-191, wherein the polynucleotide comprises a transposable element.

[0485] Embodiment 193. The method of embodiment 192, wherein the transposable element comprises a short interspersed nuclear elements (SINE) transposable element.

[0486] Embodiment 194. The method of embodiment 192, wherein the transposable element comprises a long interspersed nuclear elements (LINE) transposable element.

[0487] Embodiment 195. The method of embodiment 192, wherein the transposable element comprises an ERVL transposable element.

[0488] Embodiment 196. The method of embodiment 192, wherein the transposable element comprises an ERVK transposable element.

[0489] Embodiment 197. The method of embodiment 192, wherein the transposable element comprises an AluSp transposable element.

[0490] Embodiment 198. The method of embodiment 192, wherein the transposable element comprises a MER11C transposable element.

[0491] Embodiment 199. The method of embodiment 192, wherein the transposable element comprises an AluSx transposable element.

[0492] Embodiment 200. The method of embodiment 192, wherein the transposable element comprises an MTL1J transposable element.

[0493] Embodiment 201. The method of embodiment 192, wherein the transposable element comprises an AluSg2 transposable element.

[0494] Embodiment 202. The method of embodiment 192, wherein the transposable element comprises a THE1A transposable element.

[0495] Embodiment 203. The method of embodiment 192, wherein the transposable element comprises an AluJb transposable element.

[0496] Embodiment 204. The method of embodiment 192, wherein the transposable element comprises an MTL2B4 transposable element.

[0497] Embodiment 205. The method of embodiment 192, wherein the transposable element comprises an L2a transposable element.

[0498] Embodiment 206. The method of embodiment 192, wherein the transposable element comprises an MTL1J2 transposable element.

[0499] Embodiment 207. The method of embodiment 192, wherein the transposable element comprises a L1MB3 transposable element.

[0500] Embodiment 208. The method of embodiment 192, wherein the transposable element comprises a THE1C transposable element.

[0501] Embodiment 209. The method of embodiment 192, wherein the transposable element comprises an AluY transposable element.

[0502] Embodiment 210. The method of any one of embodiments 187-209, wherein the synthetic delivery system further comprises a transposon integration signal.

[0503] Embodiment 211. The method of any one of embodiments 187-210, wherein the synthetic delivery system further comprises a cargo.

[0504] Embodiment 212. The method of embodiment 211, wherein the cargo comprises a nucleic acid cargo.

[0505] Embodiment 213. The method of embodiment 212, wherein the nucleic acid cargo encodes a tumor suppressor protein.

[0506] Embodiment 214. The method of any one of embodiments 187-213, wherein the synthetic delivery system comprises a promoter.

[0507] Embodiment 215. The method of any one of embodiments 211-213, wherein the cargo comprises a cytotoxic cargo.

[0508] Embodiment 216. The method of any one of embodiments 148-215, wherein the ctDNA comprises a short interspersed nuclear elements (SINE) transposable element.

[0509] Embodiment 217. The method of any one of embodiments 148-215, wherein the ctDNA comprises a long interspersed nuclear elements (LINE) transposable element.

[0510] Embodiment 218. The method of any one of embodiments 148-215, wherein the ctDNA comprises an ERVL transposable element.

[0511] Embodiment 219. The method of any one of embodiments 148-215, wherein the ctDNA comprises an ERVK transposable element.

[0512] Embodiment 220. The method of any one of embodiments 148-215, wherein the ctDNA comprises an AluSp transposable element.

[0513] Embodiment 221. The method of any one of embodiments 148-215, wherein the ctDNA comprises a MER11C transposable element.

[0514] Embodiment 222. The method of any one of embodiments 112-221, wherein the biological sample comprises cancer cells.

[0515] Embodiment 223. The method of any one of embodiments 112-222, wherein the biological sample comprises a blood sample.

[0516] Embodiment 224. The method of any one of embodiments 112-222, wherein the biological sample comprises a tumor biopsy.

[0517] Embodiment 225. The method of any one of embodiments 148-224, wherein the condition is a cancer.

[0518] Embodiment 226. The method of any one of embodiments 148-224, wherein the condition is multiple myeloma.

[0519] Embodiment 227. The method of any one of embodiments 148-224, wherein the condition is pancreatic cancer.

[0520] Embodiment 228. The method of any one of embodiments 148-224, wherein the condition is colorectal cancer.

[0521] Embodiment 229. The method of any one of embodiments 112-228, wherein the subject is a human.

[0522] Embodiment 230. The method of any one of embodiments 112-228, wherein the subject is a mammal.

[0523] Embodiment 231. A method of identifying a receptor that mediates uptake of a cargo by a target cell, the method comprising: (a) isolating ctDNA or a derivative thereof that is bound to the receptor or a fragment thereof; and (b) identifying the receptor.

[0524] Embodiment 232. The method of embodiment 231, further comprising contacting the ctDNA or derivative thereof with cell lysate generated from the target cell.

[0525] Embodiment 233. The method of embodiment 231 or embodiment 232, wherein the isolating the ctDNA or derivative thereof comprises a pulldown assay.

[0526] Embodiment 234. The method of any one of embodiments 231-233, wherein the identifying the receptor comprises a mass spectrometry assay.

[0527] Embodiment 235. The method of any one of embodiments 231-234, further comprising contacting a population of cells with an antibody that binds to the receptor and determining an effect of the antibody binding to the receptor on cellular uptake or nuclear accumulation of the ctDNA or derivative thereof.

[0528] Embodiment 236. A method of delivering a cargo to a target cell, the method comprising contacting a receptor on the target cell with a synthetic delivery system that comprises a polynucleotide, thereby inducing uptake of the cargo by the target cell, wherein: (a) the polynucleotide comprises a first nucleic acid sequence identified in circulating tumor DNA (ctDNA) from a substantially similar cell type as the target cell; and (b) the receptor comprises an armadillo-like protein, an APP (amyloid precursor protein) family member, a p120(ctn)/plakophilin subfamily member, an MHC protein, a GPCR, an adhesion protein, a tyrosine phosphatase, an integrin, an ion channel, a mineral transporter, a nutrient transporter, or an ATPase.

[0529] Embodiment 237. The method of embodiment 236, wherein the receptor comprises the MHC protein.

[0530] Embodiment 238. The method of embodiment 236, wherein the receptor comprises the GPCR.

[0531] Embodiment 239. The method of embodiment 236, wherein the receptor comprises the adhesion protein.

[0532] Embodiment 240. The method of embodiment 236, wherein the receptor comprises the tyrosine phosphatase.

[0533] Embodiment 241. The method of embodiment 236, wherein the receptor comprises the integrin.

[0534] Embodiment 242. The method of embodiment 236, wherein the receptor comprises the ion channel.

[0535] Embodiment 243. The method of embodiment 236, wherein the receptor comprises the mineral transporter.

[0536] Embodiment 244. The method of embodiment 236, wherein the receptor comprises the nutrient transporter.

[0537] Embodiment 245. The method of embodiment 236, wherein the receptor comprises the ATPase.

[0538] Embodiment 246. The method of embodiment 236, wherein the receptor comprises HLA-A.

[0539] Embodiment 247. The method of embodiment 236, wherein the receptor comprises CD41.

[0540] Embodiment 248. The method of embodiment 236, wherein the receptor comprises CD97.

[0541] Embodiment 249. The method of embodiment 236, wherein the receptor comprises Integrin αVβ5.

[0542] Embodiment 250. The method of embodiment 236, wherein the receptor comprises PI4K2A.

[0543] Embodiment 251. The method of embodiment 236, wherein the receptor comprises TMEM120A.

[0544] Embodiment 252. The method of embodiment 236, wherein the receptor comprises PTK7A.

[0545] Embodiment 253. The method of embodiment 236, wherein the receptor comprises Ceruloplasmin.

[0546] Embodiment 254. The method of embodiment 236, wherein the receptor comprises PTPRF.

[0547] Embodiment 255. The method of embodiment 236, wherein the receptor comprises SLC16A1.

[0548] Embodiment 256. The method of embodiment 236, wherein the receptor comprises SLC7A5.

[0549] Embodiment 257. The method of embodiment 236, wherein the receptor comprises APLP2.

[0550] Embodiment 258. The method of embodiment 236, wherein the receptor comprises ATP1BL.

[0551] Embodiment 259. The method of embodiment 236, wherein the receptor comprises ATP2B4.

[0552] Embodiment 260. The method of embodiment 236, wherein the receptor comprises P142A.

[0553] Embodiment 261. The method of embodiment 236, wherein the receptor comprises the armadillo-like protein.

[0554] Embodiment 262. The method of embodiment 236, wherein the receptor comprises the APP family member.

[0555] Embodiment 263. The method of embodiment 236, wherein the receptor comprises the p120(ctn)/plakophilin subfamily member.

[0556] Embodiment 264. The method of embodiment 236, wherein the receptor comprises PKP4.

[0557] Embodiment 265. The method of any one of embodiments 236-264, wherein an anti-dsDNA antibody inhibits uptake of the cargo by the target cell at least 10% as determined by a confocal fluorescence microscopy assay.

[0558] Embodiment 266. The method of any one of embodiments 236-264, wherein an antibody that binds to the receptor reduces uptake of the cargo by the target cell at least 10% as determined by a confocal fluorescence microscopy assay.

[0559] Embodiment 267. The method of any one of embodiments 236-264, wherein the first nucleic acid sequence is in a 3′ region of the polynucleotide.

[0560] Embodiment 268. The method of any one of embodiments 236-267, wherein the polynucleotide further comprises a second nucleic acid sequence identified in the ctDNA from the substantially similar cell type as the target cell.

[0561] Embodiment 269. The method of embodiment 268, wherein the second nucleic acid sequence is in a 5′ region of the polynucleotide.

[0562] Embodiment 270. The method of any one of embodiments 236-269, wherein the first nucleic acid sequence is in a 5′ region of the polynucleotide.

[0563] Embodiment 271. The method of any one of embodiments 236-270, wherein the polynucleotide further comprises a second nucleic acid sequence identified in the ctDNA from the substantially similar cell type as the target cell.

[0564] Embodiment 272. The method of embodiment 271, wherein the second nucleic acid sequence is in a 3′ region of the polynucleotide.

[0565] Embodiment 273. The method of any one of embodiments 236-272, wherein the polynucleotide is double stranded DNA.

[0566] Embodiment 274. The method of any one of embodiments 236-273, wherein the synthetic delivery system does not utilize a viral vector, a nanoparticle, a lipid nanoparticle, a liposome, an exosome, a dendrimer, a gene gun, or electroporation.

[0567] Embodiment 275. The method of any one of embodiments 236-274, wherein the cargo is delivered to a nucleus of the target cell.

[0568] Embodiment 276. The method of any one of embodiments 236-275, wherein the synthetic delivery system further comprises a transposon integration signal.

[0569] Embodiment 277. The method of any one of embodiments 236-276, wherein the cargo comprises a nucleic acid cargo.

[0570] Embodiment 278. The method of embodiment 277, wherein the nucleic acid cargo is integrated into the target cell's genome.

[0571] Embodiment 279. The method of embodiment 278, wherein an anti-dsDNA antibody reduces integration of the nucleic acid cargo into the target cell's genome at least 10% as determined by a metaphase chromosome spread assay or a confocal fluorescence microscopy assay.

[0572] Embodiment 280. The method of embodiment 277, wherein an antibody that binds to the receptor reduces integration of the nucleic acid cargo into the target cell's genome at least 10% as determined by a metaphase chromosome spread assay, sequencing, or a confocal fluorescence microscopy assay.

[0573] Embodiment 281. The method of any one of embodiments 236-280, wherein the target cell is a leukocyte.

[0574] Embodiment 282. The method of any one of embodiments 236-280, wherein the target cell is a myeloid cell.

[0575] Embodiment 282. The method of any one of embodiments 236-280, wherein the target cell is a lymphoid cell.

[0576] Embodiment 282. The method of any one of embodiments 236-280, wherein the target cell is a plasma cell.

[0577] Embodiment 283. The method of any one of embodiments 236-280, wherein the target cell is a multiple myeloma cell.

[0578] Embodiment 284. The method of any one of embodiments 236-280, wherein the target cell is a pancreatic cell.

[0579] Embodiment 285. The method of any one of embodiments 236-280, wherein the target cell is a pancreatic cancer cell.

[0580] Embodiment 286. The method of any one of embodiments 236-280, wherein the target cell is a gastrointestinal cell.

[0581] Embodiment 287. The method of any one of embodiments 236-280, wherein the target cell is a colorectal cancer cell.

### EXAMPLES

### Example 1: Involvement of Membrane Proteins in Cellular Uptake of Circulating Tumor DNA (ctDNA)

[0582] This example demonstrates that cleavage of surface-exposed membrane proteins by trypsin reduces cellular uptake of circulating tumor DNA (ctDNA).

[0583] Multiple myeloma (MM1s) cells, pancreatic cancer (MIA) cells, and colon cancer (HCT116) cells were cultured with CY5 labelled-ctDNA from patients with corresponding types of cancer (e.g., multiple myeloma, pancreatic cancer, and colon cancer, respectively). The cells were cultured with or without trypsin treatment to cleave cell surface-exposed membrane proteins. CY5 ctDNA fluorescence was measured by flow cytometry.

[0584] The addition of trypsin reduced the proportion of multiple myeloma cells that were positive for CY5 ctDNA fluorescence from about 52-54% to about 20-30% (FIG. 1A, quantifying the percent positive cells upon incubation with ctDNA from three multiple myeloma patients (A, D, E), with (+T) or without (−T) trypsin treatment). For example, in a representative experiment, trypsin treatment reduced the percent of MM1s cells that were positive for ctDNA signal from about 54.2% to about 29.1% (FIG. 1B, top panels, showing representative scatterplots of cells in the various treatment conditions). These results suggested that ctDNA incorporation is mediated by interaction of ctDNA with a cell surface receptor protein.

[0585] Almost all (˜99%) pancreatic cancer cells and colon cancer cells were positive for ctDNA, with or without trypsin treatment (FIG. 1A, FIG. 1B).

### Example 2: Anti-Double-Stranded DNA Antibodies Reduce Nuclear Localization of ctDNA

[0586] This example demonstrates that anti-double-stranded DNA (anti-dsDNA) antibodies reduce nuclear localization of ctDNA.

[0587] ctDNA from multiple myeloma or pancreatic cancer patients was incubated with 1 g/mL of anti-dsDNA antibodies. The anti-dsDNA antibodies were from subjects with systemic lupus erythematosus (subjects SLE1, SLE2). Control ctDNA samples were incubated with IgG isotype, or no antibody. After 24 hours of incubating the ctDNA with the anti-dsDNA antibodies, the ctDNA was added to cultures of cell lines of the same cell type as the ctDNA's tissue of origin, multiple myeloma (MM1s) cells or pancreatic cancer (MIA) cells. 24 hours later, samples were imaged and the nuclear intensity of ctDNA determined. Pre-treatment of ctDNA with anti-dsDNA antibodies significantly reduced nuclear localization of the ctDNA relative to IgG isotype control or PBS (FIG. 2; ctDNA nuclear intensity: 3.23-4.2 MM and 2.06-2.8 PC; IgG isotype control 16.5 MM ctDNA and 25.6 PC; or PBS 7.9 MM and 14 PC; p<0.0001).

### Example 3: Identification of Cell Membrane Proteins that Bind ctDNA

[0588] To evaluate proteins that can potentially function as ctDNA recognizing receptors (e.g., that mediate internalization of ctDNA into cells), pull down and mass spectrometry assays were conducted (FIG. 3).

[0589] ctDNA was extracted from plasma of patients with multiple myeloma, pancreatic cancer, or colon cancer using a QIAamp Circulating Nucleic Acid Kit. For control DNA, a CMV-GFP vector was linearized. ctDNA and control GFP DNA were labeled with biotin using a Biotin Label IT® Nucleic Acid Labeling kit. A biotin-only control was used to identify false positives.

[0590] A first co-incubation was conducted to bind ctDNA to plasma proteins. The ctDNA samples were incubated with plasma from the same cancer type as the ctDNA. In some experimental conditions, the plasma was pre-treated to deplete the most common plasma proteins using a commercial kit to enhance signal from less common proteins. Each of the following were incubated for 24 hours: (a) biotin and plasma; (b) biotinylated GFP DNA and plasma; (c) biotinylated ctDNA and plasma; (d) biotinylated ctDNA and plasma depleted of the most common plasma proteins; and (e) biotinylated ctDNA.

[0591] After incubating for 24 hours, a first pulldown was performed using streptavidin magnetic beads to collect biotin-labeled DNA and plasma proteins bound thereto.

[0592] A second co-incubation was then conducted to bind the output of the first pulldown to cell lysates. Three cell lines of different tumor types were used: MI1s (multiple myeloma) cells, MIA (pancreatic cancer) cells, and HCT116 (colon cancer) cells. Lysates were obtained from 50 million cells of each cell line, and the outputs of the first pulldown were incubated with the cell lysates for 24 hours. The ctDNA samples were incubated with lysates from the same cell type as the ctDNA.

[0593] A second pulldown was then performed to obtain samples with ctDNA that bound to proteins in the cell lysate. The products obtained were subjected to Fusion Orbitrap mass spectrometry to identify proteins.

[0594] Enrichment of proteins that bound to ctDNA was determined based on comparing the ctDNA conditions against the biotin alone and biotinylated GFP DNA conditions.

[0595] Two methods of analysis were performed. In a first analysis, data were analyzed after quantile normalization and MAxQuant software analysis was used for linear modeling. In a second analysis, proteins selected met the following criteria: (a) at least three-fold increase compared to biotin alone and biotinylated GFP DNA conditions, and (b) enriched across all tumor types in similar experimental conditions.

[0596] Illustrative proteins identified as candidates that bind to ctDNA are provided in Table 1, and FIG. 4. Non-limiting examples of proteins identified as candidates that bind to ctDNA include HLA-A, CD41 (ITGA21B; Integrin alpha 2b), CD97, Integrin β5 (ITGB5), Integrin αVβ5, PI4K2A, TMEM12A, PTK7A, ceruloplasmin, PTPRF, SLC16A1, SLC7A5, ATP1B1, ATP2B34, and APLP2.

[0597] Table 3: illustrative membrane bound proteins identified as interacting with ctDNA,

TABLE 3

| Ratios from raw data | | | Quantile norm/ MaxQuant | | | | |
|---|---|---|---|---|---|---|---|
| | depleted | | | depleted | | | |
| plasma + | plasma + | | plasma + | plasma + | | Accession/ | |
| lysate | lysate | lysate | lysate | lysate | lysate | Gene Symbol | Description |
| X | X | X | X | X | X | A0A0G2JI | HLA class I |
| | | | | | | F2/ | histocompatibility |
| | | | | | | HLA-A | antigen, A alpha |
| | | | | | | | chain |
| | X | X | | | | P48960/ | CD97 antigen |
| | | | | | | CD97 | |
| | X | | | | | P00450/CP | Ceruloplasmin |
| | X | X | | | | Q13308/ | Inactive tyrosine- |
| | | | | | | PTK7 | protein kinase 7 |
| X | X | | X | X | X | P10586/PT | Receptor-type |
| | | | | | | PRF | tyrosine-protein |
| | | | | | | | phosphatase F |
| | X | | | | | P53985/ | Monocarboxylate |
| | | | | | | SLC16A1 | transporter 1 |
| | | X | | | | Q01650/ | Large neutral amino |
| | | | | | | SLC7A5 | acids transporter |
| | | | | | | | small subunit 1 |
| | | X | | X | X | Q9BXJ8/ | Transmembrane |
| | | | | | | TMEM120A | protein 120A |
| | | X | | | | P18084/ | Integrin beta-5 |
| | | | | | | ITGB5 | OS = Homo sapiens |
| | | | | | | | OX = 9606 |
| | | | | | | | GN = ITGB5 PE = 1 |
| | | | | | | | SV = 1 |
| | | X | | | | P08514/ | Integrin alpha-IIb |
| | | | | | | ITGA2B | |
| | | | | | | (CD41) | |
| | | X | | | | P05026/ | Sodium/potassium- |
| | | | | | | ATP1B1 | transporting ATPase |
| | | | | | | | subunit beta-1 |
| | | X | | | | P23634/ | Plasma membrane |
| | | | | | | ATP2B4 | calcium-transporting |

[0598] The identified proteins included proteins involved in immune recognition and proteins with DNA binding capacity. HLA-A was the top protein identified and was present in all methodological analyses and in all experimental conditions. APLP2, which can interact with HLA-A during antigen recognition, was also identified.

### Example 4: Anti-HLA-A Antibody Reduces Nuclear Localization of ctDNA

[0599] This example demonstrates that an antibody that binds to HLA-A can reduce nuclear localization of ctDNA, suggesting that HLA-A can be involved in uptake of ctDNA.

[0600] 5×10⁴ PANC-1 (pancreatic cancer) cells per replicate were pre-incubated for 4 hours with 1 μg/mL of anti-HLA-A antibody or IgG isotype control. Rhodamine-labeled ctDNA was then added at 1 μg/mL. After allowing time for uptake, cells were fixed by adding 4% paraformaldehyde for 15 minutes. Slides were washed with PBS twice, then cells were counterstained with 4, 6-diamidino-2-phenylindole (DAPI) for 10 minutes for nuclear detection. Images were acquired using Leica SP8 LIGHTING confocal microscope.

[0601] The anti-HLA-A antibody reduced ctDNA uptake and nuclear localization compared to the IgG isotype antibody (FIG. 5), suggesting that HLA-A can be involved in cellular uptake of ctDNA.

[0602] In an additional experiment, 5×10⁴ MM1s cells per replicate were seeded in a 96 well black clear bottom plate and pre-treated for 4 hours with titrating doses of anti-HLA-A (e.g., anti-HLA-A2) antibody or IgG isotype control (doses: 0, 0.25, 0.5, or 1 μg/mL), after which rhodamine-labeled ctDNA was added to the culture wells at 1 μg/mL and incubated for 24 hours. 30 minutes prior to the end of incubation period, cells were stained with Hoechst dye (5 μg/mL final) for nuclear detection, and the plate was scanned using an ImageXpress 5000A Automated Acquisition and Analysis System. Treatment with the anti-HLA-A antibody appeared to reduce internalization of ctDNA (FIG. 6A and FIG. 6B).

[0603] In some wells, cells were fixed and stained with a fluorescent secondary antibody to stain HLA-A-expressing cells and differentiate them from cells that were HLA-A negative. Pre-incubation with the anti-HLA-A antibody reduced nuclear intensity of the rhodamine-labeled ctDNA for cells that expressed HLA-A (FIG. 6C). The numbers above the columns indicate the concentration of the anti-HLA-A antibody (0, 0.25, 0.5, or 1 μg/mL).

### Example 5: Inhibition of ctDNA Nuclear Localization by Antibodies

[0604] The ability of antibodies to block ctDNA uptake and nuclear localization was evaluated.

[0605] MMI1s multiple myeloma cells were seeded at 5×10⁴ cells in mL per replicate, and pre-incubated with 1 g/mL of antibody for 4 hours prior to adding rhodamine-labelled or CY5-labelled ctDNA (1 g/mL). Cells were cultured with the ctDNA for 24 hours, then fixed. In some conditions, the fixed cells were treated with a AF488-labelled secondary antibody to stain cells with antibody bound to the candidate receptor and differentiate the stained cells from cells without antibody bound. Images were taken using Lattice light-sheet microscopy.

[0606] Adherent cells were grown on coverslips prior to processing. After cells were attached to slides, slides were washed with PBS twice, and the cells were then counterstained with 4, 6-diamidino-2-phenylindole (DAPI) for nuclear detection. For live-cell imaging, the plasma membrane was labeled following the cellLight Plasma Membrane-green fluorescent protein (GFP), Bacman 2.0 protocol. Images were acquired using a Leica SP8 LIGHTING confocal microscope.

[0607] Lattice light-sheet microscopy was used to obtain live image and movie acquisition. Images were acquired using a 3i v1 Lattice Light Sheet microscope in sample scanning mode, with Δs of 0.8 μm and 71 steps, and a 20 μm x-dither scan of the lattice pattern created with a 0.550 outer NA/0.500 inner NA annuli. Volume data were collected using a Hamamatsu ORCA-Flash 4.0 v2 via a Semrock FF01-446/523/600/677 blocking filter for both 488 nm and 560 nm laser channels (5% and 10% power respectively) every 3 mins for 1-2 hours. Raw data were deskewed using 3i SlideBook 6 software to create correctly orientation volumetric data. The 3D visualization, surfaces and movies were created in Bitplane Imaris 9. Isosurface settings were user selected for each dataset to efficiently represent signal boundaries.

[0608] For quantification of the nuclear localization of labelled ctDNA, 10 images were obtained per sample in fields with a minimum of 10 cells. Volumetric data sets were acquired using a Leica SP8 confocal microscope. All data were acquired with the same x, y, and z sampling, and with the same xy zoom. Z-stack total heights were varied to encapsulate the thickness of the randomly selected field of view. Data were analyzed using Fiji 24, ilastik 25, and Matlab computational software. A Fiji macro was used to convert raw.lif files as required; ilastik machine learning models were trained and then applied to classify specific nuclear morphologies; and Matlab was used to process resulting probability maps and quantify labelled ctDNA signal within the nuclei. Nuclear intensity fold change values were calculated by measuring the nuclear intensity produced by the labeled ctDNA over the background intensity of the nuclear signal in control cells.

[0609] Statistical results were analyzed by comparing each measurement with control ctDNA and ctDNA+IgG coculture conditions. Student's T test was used for measuring statistical significance.

[0610] Of cells that stained positive for the anti-receptor antibody, reduced ctDNA mean nuclear intensity was observed for cells treated with anti-CD97, Integrin αVβ5 (labelled as Int-P1F6 for the antibody clone), anti-P142A, or anti-PTK7A antibodies (FIG. 7).

### Example 6: Detection of Multiple Myeloma ctDNA-Receptor Binding Via Modified Amplified Luminescent Proximity Homogeneous Assay (ALPHA)

[0611] To evaluate ctDNA binding to proteins that can potentially function as ctDNA recognizing receptors (e.g., that mediate internalization of ctDNA into cells) in multiple myeloma, an Amplified Luminescent Proximity Homogeneous Assay (ALPHA) was performed. Membrane lysates were extracted from 5×10⁷ cells from multiple myeloma cell lines (e.g., MI1a, OPM1, RPMI, JK6L) and non-myeloma cell lines (e.g., MIA, HTC116, A549, MDA-MD-468). ctDNA from a multiple myeloma individual was labeled with biotin. Pre-cleared membrane lysates (2.5 g/mL) were incubated for 1 hour with biotinylated-ctDNA (2 g/mL). A primary antibody (100 nM) (e.g., targeting a ctDNA-receptor candidate) was added to the mixture for 1 hour. The mixture was incubated for an additional hour with streptavidin-coated donor beads and protein A-acceptor beads. Next, luminescence was measured with an ALPHA-capable plate reader. IgG antibodies and biotin were used as controls. The luminescence ratio was measured between an antibody targeting a protein of interest and the biotin control signal. An antibody that increases the IgG/biotin ratio by more than threefold was identified as a protein with an active interaction with ctDNA.

[0612] ALPHA revealed that PKP4 and APLP2 obtained from all multiple myeloma cell lines interacted with multiple myeloma ctDNA, as did HLA-A taken from MMIs cells (FIG. 8A). The interaction with multiple myeloma ctDNA was lost when these proteins were extracted from non-myeloma cell lines (FIG. 8B).

[0613] These data support a role of PKP4, APLP2, and/or HLA-A in binding and/or mediating uptake of multiple myeloma ctDNA by multiple myeloma cells.

### Example 7: Competitive Inhibition of ctDNA Uptake

[0614] This example demonstrates competitive inhibition of ctDNA uptake by other ctDNA, or by a synthetic delivery system polynucleotide, suggesting a shared receptor, binding/capture mechanism, and/or internalization mechanism.

[0615] Multiple myeloma cells (e.g., MMIs cells) were cultured with unlabeled DNA at 0, 25, 50, 100, 200, 400, or 800 ng doses (unlabeled control DNA, unlabeled ctDNA, or an unlabeled synthetic delivery system polynucleotide comprising a recognition sequence (MM-ZC)). After one hour in culture with the unlabeled DNA, fluorescently labeled DNA was added (CY5 labeled control DNA, CY5 labeled ctDNA, or CY5 labeled synthetic delivery system polynucleotide comprising a recognition sequence (MM-ZC)). Cells were incubated for two hours to allow for binding and uptake of the labelled DNA, then analyzed by flow cytometry. The unlabeled ctDNA or synthetic delivery system polynucleotide inhibited uptake of labeled ctDNA or synthetic delivery system in a dose-dependent manner, as shown by a reduced percentage of cells positive for CY5 signal (FIG. 9).

[0616] These data are consistent with receptor-mediated capture of ctDNA and the synthetic delivery system polynucleotide, and suggest that the ctDNA and synthetic delivery system polynucleotide can share a receptor, binding/capture mechanism, and/or internalization mechanism. The same effect was not observed for control DNA.

[0617] These data also demonstrate reduced uptake of ctDNA by target cells upon treatment (e.g., contacting) with a DNA antagonist (e.g., synthetic delivery system polynucleotide, or ctDNA).

### Example 8: Colocalization of ctDNA and Receptors

[0618] This example demonstrates colocalization of ctDNA with receptors associated with the uptake of ctDNA.

[0619] MM1s cells were cultured for four hours with rhodamine-labeled ctDNA from multiple myeloma patients, then fixed. After fixation, immunofluorescence staining was conducted with primary antibodies specific for APLP2, PKP4, or HLA-A, and an Alexa fluor 488 labelled secondary antibody for detection.

[0620] Fluorescence microscopy demonstrated colocalization of ctDNA with APLP2, PKP4, and HLA-A at the cell membrane (FIG. 10).

### Example 9: Detection of Multiple Origin ctDNA-Receptor Binding Via Modified Amplified Luminescent Proximity Homogeneous Assay (ALPHA)

[0621] Amplified Luminescent Proximity Homogeneous Assay (ALPHA) is performed to evaluate proteins that can potentially function as ctDNA recognizing receptors (e.g., that mediate internalization of ctDNA into cells). Membrane lysates are extracted from 5×10⁷ cells from various cancer cells (e.g., pancreatic cancer, colorectal cancer) and control cells, such as non-cancer cells, or cells of a different cancer type. ctDNA from an individual with cancer (e.g., pancreatic cancer, colorectal cancer) is labeled with biotin. Precleared membrane lysates (2.5 g/mL) are incubated for 1 hour with biotinylated-ctDNA (2 g/mL). A primary antibody (100 nM) (e.g., targeting a ctDNA-receptor candidate) is added to the mixture for 1 hour. The mixture is incubated for an additional hour with streptavidin-coated donor beads and protein A-acceptor beads. Next, luminescence is measured with an ALPHA-capable plate reader. IgG antibodies and biotin were used as controls. The luminescence ratio is measured between an antibody targeting a protein of interest and the biotin control signal. An antibody that increases the IgG/biotin ratio by more than threefold is identified as a protein with an active interaction with ctDNA.

### Example 10: Competitive Inhibition of ctDNA Uptake

[0622] This example demonstrates evaluation of competitive inhibition of ctDNA uptake by other ctDNA, or by a synthetic delivery system polynucleotide. Results of such an assay can suggest a shared receptor, binding/capture mechanism, and/or internalization mechanism.

[0623] Cells of suitable types (e.g., pancreatic cancer cells or cell lines, colorectal cancer cells or cell lines) are cultured with unlabeled DNA at 0, 25, 50, 100, 200, 400, or 800 ng doses (unlabeled control DNA, unlabeled ctDNA, or an unlabeled synthetic delivery system polynucleotide comprising a recognition sequence). After one hour in culture with the unlabeled DNA, fluorescently labeled DNA is added (e.g., CY5 labeled control DNA, CY5 labeled ctDNA, or CY5 labeled synthetic delivery system polynucleotide comprising a recognition sequence). Cells are incubated for two hours to allow for binding and uptake of the labelled DNA, then analyzed by flow cytometry. Inhibition of uptake of the labeled DNA by the unlabeled DNA is evaluated.

### Example 11: Colocalization of ctDNA and Receptors

[0624] This example demonstrates colocalization of ctDNA with receptors associated with the uptake of ctDNA.

[0625] Cells of suitable types (e.g., pancreatic cancer cells or cell lines, colorectal cancer cells or cell lines) are cultured for four hours with rhodamine-labeled ctDNA from suitable sources (e.g., pancreatic cancer, colorectal cancer, etc.), then fixed. After fixation, immunofluorescence staining is conducted with primary antibodies specific for candidate receptors (e.g., receptors identified herein, such as APLP2, PKP4, HLA-A, CD41, CD97, ITGB5, ITGA2B, Integrin αVβ5, PI4K2A, TMEM120A, PTK7A, Ceruloplasmin, PTPRF, SLC16A1, SLC7A5, ATP1B1, ATP2B4, P142A, or PIP4K2A), and an Alexa fluor 488 labelled secondary antibody for detection.

[0626] Colocalization of ctDNA with receptors is evaluated via fluorescence microscopy.

### Example 12: Reducing Uptake of ctDNA by Target Cells in a Subject

[0627] An antagonist of a ctDNA receptor identified as disclosed herein is administered (e.g., as a pharmaceutical composition) to cancer patients. The antagonist can be an antagonistic antibody or antigen-binding fragment that binds to the receptor. The antagonist can be an antagonistic antibody of, for example, PKP4, APLP2, HLA-A, or another receptor disclosed herein.

[0628] Upon administration, the uptake of ctDNA by target cells in patients is monitored via PCR of the subject's biological sample (e.g., blood, plasma, or a sample comprising cancer cells).

[0629] The effect of the antagonist on the cancer is also monitored. Response to antagonist administration on cancer progression, metastasis, and/or development of resistance to anti-cancer drugs is evaluated by suitable techniques including imaging modalities (e.g., radiography, magnetic resonance imaging, computerized tomography). Furthermore, the effect of the antagonist on the cancer is determined using criteria for cancer progression and/or tumor growth (e.g., International Uniform Response Criteria for Multiple Myeloma, RECIST criteria).

[0630] An effect of administering the antagonist on cancer progression, metastasis, and drug sensitivity is determined.

### Example 13: Evaluation of a Cancer Sample for Expression of a Receptor that Mediates Uptake of ctDNA

[0631] A biological sample (e.g., blood or cancer biopsy) is obtained from a subject with cancer (e.g., multiple myeloma, pancreatic cancer, or colon cancer) to measure expression of a ctDNA receptor disclosed herein.

[0632] Expression of a ctDNA receptor at the protein and/or mRNA levels is measured using suitable methods. For example, for detection at the protein level, immunohistochemistry is performed on a cancer biopsy with and an antibody for a ctDNA receptor. An ELISA assay (e.g., with plate coated with ctDNA receptor antibody) is performed to detect a ctDNA receptor in biological samples, such as blood and isolated plasma, from subjects with cancer and without cancer as controls. Fusion Orbitrap mass spectrometry is also performed with biological samples from subjects with cancer for unbiased proteome profiling of receptors associated with ctDNA uptake.

[0633] RNA is extracted from biological sample from subjects with cancer and subjected to qPCR and/or RNA-sequencing to measure expression of a ctDNA receptor at the mRNA level, relative to control (e.g., biological sample from a subject with no cancer).

[0634] Data are analyzed to determine whether tested biological samples express a receptor associated with ctDNA uptake at a level that is associated with the uptake of the ctDNA.

[0635] Results can be compared between samples separately assayed for uptake of ctDNA to determine thresholds of receptor expression that are associated with uptake of the ctDNA.

### Example 14: Treating Cancer on the Basis of Expression of a Receptor that Mediates Uptake of ctDNA

[0636] Biological samples from subjects with cancer are assayed for expression of a receptor associated with uptake of ctDNA as described in EXAMPLE 13. The presence/absence of receptor expression above a detectable level, or a level of expression of the receptor is used as a criterion for determining whether a subject is a candidate for administration of a therapeutic agent, such as a ctDNA-derived synthetic delivery system disclosed herein (e.g., as part of a pharmaceutical composition). For example, a subject with a cancer shown to express a receptor associated with uptake of ctDNA at a level that is associated with uptake of the ctDNA can be administered a synthetic delivery system disclosed herein that binds to and induces uptake by the receptor, while the synthetic delivery system is not administered to a subject with a cancer that does not express the receptor at a level associated with uptake of ctDNA.

The application's sequence listing, which the Patent Office published only in electronic form, follows.

SEQUENCE LISTING (349 sequences)

SEQ ID NO: 1 - DNA, 7120 bp, synthetic construct
  misc_feature 1..7120: note = Description of Artificial Sequence: Synthetic polynucleotide
  source 1..7120: mol_type = other DNA
gaggatggcttgagtttagaggatggaggttacagtgagctatgattgtgccactgtacttcagcctgagggacagagccagaccctgtctcagaaaaacctagaacaacaacaaacagagagaggagcctggacggactgagcaatattagtgtccaggagctgctgtagtgatggcttacaacatcaggaatttattctctcacagttctggaggccacaagtccaaaatcaaggtgtgggcagaaatgcactccctctgcagactcttggggaggattcttgtttcttccagctctgcgactgtggtgcctgcagccattggaaccagctctgcacggctcagacctgggtgatgaggacacagctttgcaggtgggcagccacatccctaaggggagactgtgggcctgtggcagggtaggggcaagcagggcaggggctccccattgttgcccctgagctcctggggcttgtggagaaagacaggtggatgcacacatactgcagctccctggatctgagccttggtttccctacctgtgaaatgggcacccaaggcagctcagaagtgtctgggagcatcccctgtgggggaaggtgtggggggctgctgggccacagtcatggggaaccccagtccccctctccatgtgcttccttcaatgctccctgatgccagaagacctgcccctgaacagagaggggcattcttgtgagttccttgtgtgggggtttggtcacagagactccccaagtgcagggcagggtggagggaggctaaagggtggttgaatggacaggagaagagctctctccagtccctcgggtctgggtggcctggggagcatccatttgggcaggcagctggcgtggctggtggctgagccactgtggctcggggaccccaggtgtctcctggacagaaagagccctggtcactcatggctgcagcatagccatggcgacaggaaagtgctgctgtacattgtgctcctggggctggctcccaatggacacccaatggcatctcccccactgtactctgggatgctggcaggggtgatgggcactggggtaagagccttggcaagcccttcgctccctgggtgtgagaccttgggctcctggatgcctgggtttctgtgtcctatttttcccatggaagatgtttggggtgctcccacgaaatggggagggccctggggggtcaggattgtattattaaagccagaaactctggggttccatttttagcacaaggcaggcagcccatgagccacagcccagtggccagcctgtgtgggaggggagtgggggtctgaaggagtgaggatcctgttaccgcaggctccactgcagccccccagggtggccgtgtgggctggacagtgggcactgcaccaggggctctggtgccgaccttgagccatgcatctgatgcctgtgagagtgatctctaggagccactgcacagggggcagatgagggaacccagacatgagacagctgagggcgaccccaacacggagggggcagctgtgtccaggctccactggattccgcagaggacagaacacagctctgactctaggatgtgggctcactgagggtcaggacaggctggggttgggagagggctatgctgcagctgggccacatcccacctgcacccctcagatggcagggcctggacgtccccatccccaccctgacccggtcagtaacagccacaggccagcagcccccagcaaccgctccctccctgaactgcctgggacaggaggtaccatagtctcttctaggcgagagctgctggagccttctttattcttgtgctagaagcccagggtggggagaggagcctgagaacagcccagtgtgggcatccaccttcctgcccactttggaggtctgaatcacctccggccactctcccaatccccaggagccaagaggcttcctggagcaagccgcacctgatctccaccatgggtaggagttcaaggccaggtcaacggggactccacagaggggcctgtgggttagcagcagctgccagtgtccagatggcctcaggggtgggggttggacaatctggaggtcagcagggaattcagcatgaggagacagcccttagggttctggcccagcagccccaggtgctggctctgcactgagtcatgaagtttgtgggccaggggcgttggcctctctctagctggaagtgacttccatcactgctgtcattagcctcccctgcatcaacctgtccctggggtgggagcacagtgggcacagggaccgtcaagcctcagttttccctgctgtaaaatgcatgtgatagtgaggcggtcatgaggcctgaaggagttaaaacctgccttgtgatcaggatggcacctagctcggtgcctcctagcctggtgccaccatccggcatcagagatgaaatacgtctcccaggccccctcccctggcatcctccacactcagctctccatcagccacaccctccagggtgggacaaggaggtcctgagactgatggggacccgacagggctgggcagcaccacctgggcctaggcgataatgggagcctgagtgtggggcctgcagggagggagccattgtttcttgggcttcttagtggctacttccctaaagtctgggagaagcactgctgctcaagaggggacagtgccagcagctccctctgaggctggggtgggcacagcatagggtgtcctcacccccacccacctcccatggaggttcctggctctcttggaggactcctcgctactgtgctgaggctggcaccagggctgaccaggcccaggatggtgttggaccacctgcatccccctgcagcaggcagggagggcactgcagacaccaccctcccacagctgacccctccctggccattgtgtctagggtggcagggtgtgaagcccccacccaacaacctccctcagctcaggggcctttgtgttcaccaccatctgcctcactgcaggttttccctgtgctgggtgggggtgattgcagggagatggttctttggtattccctgggcaggtcattgcctcagcccctgcctggtgtcctggaacagctttgaggagctacatggacaggacaccaactgtctgcagcccccaggtgaggcttggctgctgtgtcccactgcctctgctcctggctgtcaaaaccccatggtaacagcatccagggcgaatttaaatggcaccccaaagaataagagtgggcctgggtgtcactgtagtgactggtggcttgtgacaagtagtgtggcttccgtggtgatgggaaatgacagttccccctgaatctgcactggagagaaggtcctggaagctttcgggcccaccctccagggtctgggtctgcatctctgagagtggctgggtgggaagaagaatcctcactgcctggcagtcgggtttggagctggggagggccgggcctggttagcaacgagcctatcacagtgaaccagagctcaagataaagcgagaggcctagcccagacacctccttccctggtcccagcccctgtgccttggcctgtgcggtggaagccaggctccctcctccaggaagtcttccctgcactgcctgctcacacacagcctctcccagatttctccccatccaggctgagtaggtttcccaagaaggctcctccccgagccaactgcctgcagtcaacattatcacctcccccagtgaacggcagtagtgtttttcgtcttcagcagtggcctctggaggggtcctagcaggtcggggagagaggtctgagttagccccacgtgaaaggcagcccatgcctcttctcccagcaacccccagcagcaatttccacctggctgaccccacccagctcacagagctgcccagctggttgtcctcgtggttgattggggggaaggggctgttacctcccggtcccctccaggctgagacaagagccctgtgggcctggatcttgcagatgggacccccacccacaggctctccaggtggatgcccaccctgggctgttctcaggcccctctccccacactgggcccacacccagaagggaactccatgtacccctgccgatctgcccatctgcccatctgagcctcaggggtcctgggcactgagagctgggctgggctgagctcaggtatacactgtcattggggacagagaggggatgctgaagtgggtgcttctgcgtggggcctgcctggaggatcgccacagcaggtgcacccagcagccagaccagcttctagcagaataagcgcactgtcacaggggtatgtgagctgaggctgggggcctggaggtgcagggggaggagttggggagatgcagaggccgcaaagatgtcccaaggccctaagactctggtgagggaatggaggagccagcactggtggggaagtgaggagggggagctgggtggcctggctctgagcgggacacacggtctgcgcccacacttgagctgtgctgtggagccccagtccccacctgggcatgtcctgtcctctgaagcacagggattcctcatcctcagctctgacccctcatctccaactgttgggatgatgagtccataggcagagccagcctcacaggggacccaaaggccagttcagatggacagcaactggaggtcccaccgggcacacacacacactgtgcagaaagctaatgcactgtttatttgggggattggggggaagcaccgtgccgctgctcactggtagccagccagctgcaggatggtggggtagcaagtacgatgggccatgcacttctggcggtcgatgaagagactgttggtcatggcggtaacgtccttctccaggctcatgtggatgtcctcgaggttgcaaagggactgctccccttctagaagcttctcccgcagcgctgtgatggacatgttcagctcctccacctcactcaccagcttggggatgttggggggtgtgagctggggctggggagggcagaagtatgcacctaccggggtgcaggggacccaaaactcccaatgggagctggcaggaggtcctgggaagacgccatgaaaggatcccaccaggaaagcggctctagggcagagcataaattacgagggtcctcccagggagcacggtcctgagtgggaatgagtgacctgcgtgcaatctcgaccctggcagaacaggactggcctcagccgacaaggctcagttctttccattcctgatatttgacggaaggaggcacccagttccttgaaggaactgaggggcaggaaaggaagaaaggtacttaggctcagaaggggccaccaggcatccattaacaagggaaacaaaaggacggcccatctatgcctatagcccaggcgtaggtcatactttccaccagaggtggggacagcaccctcagggcagcagggaatggccctccctggcctctctggccccgtggcctccaggagctcaccttgtctgaaggagcttcttcccgggaagacgaggtagcacagggtggggtgagaccacgtgggcacaggtccctggcactgagaggcacccgacccatgacctgcccagtgtcatgtctatatcatctgtgtgtttaaggtgtgcttgcatgttgcgtgtggccgcaaagtctccctcccctctcagcacctgcgggggatgtgtgtgtggagattggagtgtttactggaaagggtcacagcgaggaggtggacgggggcaagtgggactgcctcagaggcccaggcagcacctgaactgggctgcattgccacacagctccatgttgggccagtgcaagcgcaggtacagaagggtctgggctatgtgcagaggtgcctccttgtccttgatggcctccttcagtgccgccacgttgtttctgatctgtgatttcccgcagcatctacagacaggacagtgccccttaggcctgtgcccccatgcccgggcatatcgaatgcggagaccaggctggtcctacccaggtcctggggctgtgtccagagggtggtcctgaccagtggccctggggaggcgtggatgaggggaacaatgtgcacggggcccccagtgggctctggagagtcaggcagcctgttttatcttagctctggtccaagaacccccatccttggtggtcaccaggacccaaatcctgctcaaggactggggactcagaggtggtaaaggccatgctgaggccctagagtcagagccctgcctgccaggccaggactcttggggacctcccggtcggtcaatgctcccgagaccacctcctgcctccatcctccccacagctcctccagctcagtcatgggggttgcaacaccctgtgatcatacccagtgtcacctggttttacataggtttacggagaggtgacacttgcttctggggtccttcgggataagtgggacagaggagaaaggtattgagggcccaggccatgtgatgagagggggcagagtggtgggcaggagtgggagccatcttcggggttgagggtgccccaccttgtgcaggtggtgctgcagcttgtgccgcgtgtcctccagctcctcacagcggcgcccgaaggccaggttcacggcgtcacactggagtcccaggtcctcggaggtgtcgcgaaagatgcagtccaccagcacccacaggttggccgagtccaggtgctcgcgctgggagcggcacagattgtcctgcgtgaacttggtccaggtctccggggtggaggcgctgcggggcaggagacagccaggagagggtcagggaggctctgccaaaggctgggggccctgccgcgcccccattccctgtctgcaccccatgctcctggaggaactgcatggactccaatgcaccccgtgcagacccacgaagcccagtcccccaagctccctgcctccgagtgccccccgcccacaactcccctgagtccacccacaccctacccaccccgggcacttagtcccctcctgcccccgcgaccccgttcccagcaccgctgcccccgaggccccctctgcagcacctccgtcccccgcag

SEQ ID NO: 2 - DNA, 5428 bp, synthetic construct
  misc_feature 1..5428: note = Description of Artificial Sequence: Synthetic polynucleotide
  source 1..5428: mol_type = other DNA
catgcgggtgcacatctgtagtcccagctactcaggaggctggggatggaggatcgcttgagcccaggagttccaggctgcagtgagctatagttacatcattgcactccagcctgggcaaaagagtgagactttgtctcaaaaaacaaaaatcttacaattattgagttgttataggaactattctaaatacatagcttctcatttaagcatcacgatggtgtcctatgagatagctactattgtcatctttcttaatgaggaagttgagacacagaaaggctaagcaatagttggtaagttacagggtttaaagtaggactcaagccctggttgaactgaatccaaagagtgagctctttctattcaaataggctgctgttttcattaaggcagtgagcaataagagctagtaagtattgtgctttcttcagcaaaattaagtatttgttttgaaggcagaggaaaaacatgctcttcaatttttacagttacatgaatgattgtatgttttgagatgttgcactacagtttcctaaaaagtcctcttactctcgtagaactgctctacatttggcctgtgccagtgaccatgtgaaagtggtcactctcctggttagcagaaaatgccagattgatatctgtgacaaagaaaatagaacgcctttgatacaggtatattagagccaactcttttagcatgacatggatttgatttgcatacataaaattaaaataaattgatctcatttaaatataactagttggtgaaacctgtggaatgtgtattttgaatttcttagactttacaatctatttattggtctaatacggacaggctgtccattgccaggaagaggcttgtgccgttattctgctggaacatggcaccaatccaaaccttaaggatatctatggcaacactgctctccattatgctgtgtatagtgagaacacctcactggcagaaaaactgcttttccatggtgcaaatattgaagcactggacagggtatagatcaatcaactttctttccaaaatatttgttttaacattgacataggtaagggtcatttttttatatttggaagctcaaccattccctgaatgcaaatgcaaatttttttgaaataattgtctaagattttattttaaatattcataattttaaaggagcattaaagggtacagctttataaaacgcactttggaaaatatttctgaatttgttaaaggtaaaaacttttcaacttcttttctacgcagggttattctttccttttttcccccctaattagtgtaaaacatcacaggaaagaacatatgccctggaagtaggctttgtcttaaaactcagacaaaactaaagcaacttacaagaagtggacatgttgctgctgctgataattttctgaaaaactgatgtatcatctctcagtggcacaaggcttgagagggaaaaatgagaagggaaaaggagagcaatcagaaatatgcaggtcacttggaaattaggtaatgagggaaaatgccaagaagagttttttttttttctcttagtttgttgttcttccagtttatgtgttgagacaaggcgttccttagctttgggtctaataatttttggtttgaaaatgacagtgagttgaaacttgcctagagattaattttaggaagactttgaggaaaccagattagcagggaatatgtggtgatgaagtgggaaacacttcaacagaaggtggaacaaattattaactgacttattgcccatcctggcagaaacagccacttagataagagtctaaagcctcctctcaaacctagaatgtcttggtggaaggtaggagataaggagcttataaataggaaaatcaagtgggattttgagtttacttgtctgtgttctacccatacccagaaaacttaactggagctttgataaatgacactatctcttactcttttctctttttggccacatgtccaactgataaagggaattagccatggggacgagagatgagactgaagtgattgctgcactaattctcagaattgtgcattacagtgacctgaggacattttgttaaaaatctacaattgtaggctttcccctgaggattttgatataatagatctaataaggcctgaacatttttaacaatgttttcttgaagctgggcacagtgacatgttcctgtagtcccagcttgagcctgagtttaagttcagcttgagcaccatagtgagactcttgcctctaacaacaataacagaaaaaaaaaaaaaaactcaagttttggatacactcctgattaagaaccccagaatagatacgtgcaacatataaatttctgtatctcaaaaatgtaagaaatctctagaagaattggtgtttgataggtgctacttccttcaaagttctccttttcagtaatattagcctgacatctgtttttctctacatctgtgactgggaagtgaaaagaaatattactggtaatatctctcagcttacagaataacaccttttccttcccaccgttaatccttcacaaacattcagggagtctttagcaatttgcttatgggtaatctttcaataagtagaggctgaccctttcatgatttcatgtccctttgtcaccatgcacgtgattatgtgtcaacaaatgttcattacaagttgggttttctcaattagaatagtagcaaatcctaaacttttgttttagttgaagttgtattatgaactagctcagtatgtttgttaagtttatagaactttagcatacccaaaatgtcagttttaaacactgaagtccatggagttaataaaaatacagatatgaattcttttaataatttagttttagcagtcctatgaaccagttatctatttggttaacaatcttggaaaattatataaaaatatattttaaatgaataaatgttggaaaaattcttgaagcaggtattatgagtcttttttggcaatttttattatatatgagagcctgattttttggtaaaacctatgatactagagaaagaaaatattttacatgcaaatacttggattatacacaaccatttagtaacacattagaagcgaatataaaaacacaagggctattttctaatgtggcacacagatttgtttgtttgcctctataagttgaatcagcatgtaaaatttagaagactggtgtagaaatctggacttcaggcttattctaaaaaatcaaatctggcatctctgagtttctatcactgtttgatctgctgtgcagaggttacccctttagagaaggtatgtattctccagtttggtactgtgcccaccttagtacttcctttactcaggcaaccctgctttgtccttgtaagtatctgagtttacaactcctatgttatagtatattttgataaagatttcaaggtttttaagtcagcgtgtatttgttataatatatagtctatagagtatataaatccctcagttatggagttgaattttagaatttagaagttttgaaactcttttctttatatataccacaaataattatctgtccataagaatgcctagaagcctttttaggttattcctggttatagttggataatttatgaatattgcagacattacatctttctcctcagtgctcttccttagaaatgcaagtgacttactggcttttattatgccagaaataattcatatggatcagtatgagaacttttattgataagacattatgtttttatttctgatttatattttgtctaaaataaaaaataattttaagtagccctttaagtggaagccaataaaaatggatttaaaaagtagagctgccctgaggtcctgggattaccattataattgagaatggtatttcttactgagctttggttttttaaatatttgttcttaagttttttaaacctatttctcttacacagaacatactgagctttctaacagtaaagataaaaatctgttctctcgtattagggaaaaaacccatggactatttaataataaggaaaataagtgcattggaagccaatctctcttaattcagagctcatttccatagtgacccatttggagcaggagtgcctgacattggcatctgcgatcctgacagcattgatagaagtgaatcaagcaagtttgtaccactcataagaaacctccacctgcattgggaagctctggcaactgtacccctaaaacaattcctcaaatgttaatgtttgccacaaatagtattgtcaaatggggattaggtaaacttcaatagatttcttgattattggacataacatacagttttataatatttctcaaatgcagattgtcatggagtctttctcttggggtataatacttctggtaaagcaaatattctttggaatatagtttaagaaacactgctttagtgagaataatttagatcattaatttctgtaaaaaacttaaaatgtttgctactatgtcttcgggttttggggctatagagacaaaagatacagcccttgcctcaagaagctcttggtttcagtgggaaacagtgaaatgattacaatgtaccatgctaagtgctgtgaacaaagcaaggattcttgggactggtaaacttttaaagtgagttttggcaatgaccacagttaatctggggagacagaggagggttgttgcaaggcaaagcccagcacatcagaaagcacagaggagtgagaaggaaggggctgcttttcatttacttcctttctatattgtatgttgaagttcaaaacatcccagagaagattttcatttcagttgagaaatatgtaattttgtgaattattaattttttttgtgctgtttcataggacaataatactccacttttattcaccataatttgcaagaaagagaaaatggtggaatttttattgaaacccaaagcaagtacacatgctgttgataggctgagatggtacagttgttcttttttaaaaaataaaacctgagtattctagagtggtaacagtcactcaagtcagaaatatcaataagaagattaacataattattggcatataatgaaaaatatcaccacgaataatcaggtagaccagcaaatatttggactgagtaacataaagaatagtatataggaggattcaccttctcttataatatagagtgtttggtatttatgatcagatgtttttggtactgtaatcttttatgagctaaagggttttgtattagttttattaatttttttttgagatggagtcttgctctgttgccaggctggagtgcagtggtgtgatcttggctcactgcatcctccacctcccaggttcaagcgattatcctgcctcagccttactagtagctgggactacaggtgcacgcca

SEQ ID NO: 3 - DNA, 4054 bp, synthetic construct
  misc_feature 1..4054: note = Description of Artificial Sequence: Synthetic polynucleotide
  source 1..4054: mol_type = other DNA
aactaacctgcacattgtgcacatgtaccctaaaacttaaagtataataataaaaacaaaattaaaagaggactaaaaaaatattggtgttgaagaatacaataagtcagccaacaattttaacagaggacactgtcggagaggctcaggctttcctttcccccagagcaggtagccctgaaatttccctagacatgaatcactgtttcctcccgcccaccttccacattctccccagagatgccccggactccagagttcaggttctcacatgttgtgggactttaggttaaaacccacctaaaacactgagtggctcttgtccttgatcacttcatcatcgtccccattttagttgatgtgatttttttttttacttcagtttgaaggaaagaaagcaaatccatagactctacctaagccagttttacttctctctctttccgttggtagctgcgaatgtagccccaaatatgataggaatcagtagacactgcagctcttacaacactttctcagtcagctggtccaacagtgtgggcaccacagtgtgagcacaattattttatgggactaattgtgttcctactggagacacatttcctcttatgtactgggacctccagtccattgcagcctatgattacgaagaaggaaagaaacattcttcaaatttccaacatacatgtggtaagagaaactgatatttctgtccactggtttccagacccgtgccaggtagctcctggacactgggcactgtagcgctctctgttttcgggcatttaagtatcctggagaatagtattatcctgaaaatgaccttctttagagattaaatttcctactataaaacaatggcatgaaatacctgacgtatatctcacatcatactttggagactgaagtcaacccttccatttttctgctggggtctttgtttctgggcaaatgtgagggagaaagaactgctggatcgcagactcgtgttcccgtgatcacatctcctatcctttaactatagctacattccctcatgtcagaacacattgtgcaatgtctcattctaggaataagatattcagtaacttggacagtgactctagtagcttctctatgattaagaaaaatacatgtgaagataagagttaattcttctaagtataaatgactacctataaggtttgggctttgactaagtttttcaaattatctccatatgactggtgggtatccttacagcctgtaattattttgttagacaaatgtgatgtctatctctatcagctgaggcactcagggagaggtactggtcagtctggttggaggtatctgctcactctttattgtacatgttagggaatgctctgatataaagagagagaatgctatcacttgtgagcagtatcgattaaactgcagaagttcgttgtactatgaggtcaccataccctcttaggtggcagaatagatttcccttcctttcagctgctggttttcttatgttaaattttattgcatttacttttcctttacattgttgtttctaaattctaagctattgcctgcctatttaattaaactaaacaccagtaaatttaaaattaacaattacctgtacaagcatcttaacatgggtgtgttgaagatgctgagtagagataccagaaaacaaaactaataaagaaacatattgtgtaagtttagagtagtcagtgagcaccgaaaccatgaggagcttgtgttgacttttatatgaaaaaaagttaattatatttgacatccagaaggctggtcacaccagtgagaaaaatctggagggtggtccacacagatcagaaattagaaagtgatagtcacaaacttgcagaaccagcagacatacagtgtattcagcattcagctctttctatttcttcaggaaaatagatgtgttatatctgtatggaaaatgcgacaagtagttttaagccgattctcctgggaagttgctagtgaaatcactcaagtgctgctctgacacaggattgtgaagaggacgttgacccttggtggtcactgtcagcaacacgggtgctcaaccatggtgggtgcctttgttactgttttgtccacaagagattttagcctgtcatgtgctgcatgcaggtgagtttttaaacctcagatgaggaaaataacatgaccacagagaagatgaggaaattgaagacctcacttcatcaaccaccttccactgatgaaaactttttacacagagagccagggatgagctgggaagaggaaggggctggggaagatcatccatagcaggacacatccagcctgcttgaactccctgtggaaggagggtttaaatgtttgtcctcagctaatcaggggcatttcaagaccttcataagctttcagaaaaaacagttttcatgaacaaatgcccatatgttactcagagatgtatttgtcatcatttatccttcctctctaggcagtaccacagtagcatgttctcagaattctcccttatcctctgtgagttcctgatgcagctcctggaggaaaagcctgcatgggagagggagccctcctcaagtgcagccctgaggctgtcccatcacctcacccgccactgcccttcagtcactttgtaaacatttctgagctaatcttcctgaaagtgtggttttgggcactatattcagcaggtaagaaaatccttaagctctgtttatttctacaggcatgtatctctttctggagcacaggttgattctgactgtgtggtagacgataattcatgacaggaggtttctatgcatctcgtcaactcccagagtgcaccctccacggggttgacacgcacatgccagcagatggaatttctcagctggaggatgacattttcataacctatgacctcagtggtgctctttccttgtaagaccaatcatgatcatgcccctggctaatgtgcagtcattaagggtgagacgtgcccttgtgagggtttcttccaggtgcccacacactttgtaaagggaagcttttgctccttcctgtgtcccgtgcatgtgtttgcatttactgcacagaccacctttttcagaaccaccacccaagagctcacagtgcatctaatccaactctagggcattatacatggagtctctcattgccagggtctccaattcccatgaaaggatgttcattatgggattccccagaacttgctggccttttagagacatgaacctgcctctaaaatcttaaaaatcttactctctgggaaggatctttgtaaaccagaagtaagataagctttaaattaatatatgttttgtggattttggaagaatgagttcaaatagtaagagcctcaccaactttccctctaactaatatgattcctagaaatccactgaacaaaacttgtggtattccgagataaattaggcttgttatattagggcatcaccaaaaaagaaagaatcaaatgtccttggagattcctccattgtaactgatttgtgactgtggtgctggatggtcatagtggaggaggctctgcctgtgtagggcagggagtcatgggaattctcatgccttctgtgcaatttcattgtaatcctaaaactgctctaaaattaattttatgataaagagtggcagaaacatttgaaagaattttttccactttttaagaatcatactgtctcacctcatgatcaaataacattgctccaaattatttattcatctaatttgaaaacttgttcacagtagcaccttcctggaatgtttttatcaactttattgagtgtggcctttcccactgtgaattcggcttctacaattcttgaattgaatatatctcttaaaattagagtgtgtacttgtttctattgttatttttttctcaaatatataacccattttcaaaaaagccttaaacctgataacccctgtcatctcctcagcccagcacagctgccttctcccctagggtttctgactctctgaggatgtggtttttcacactgtgcctctcgcacagtaa

SEQ ID NO: 4 - DNA, 3992 bp, synthetic construct
  misc_feature 1..3992: note = Description of Artificial Sequence: Synthetic polynucleotide
  source 1..3992: mol_type = other DNA
gtctgcctgctaagcaacctcttggggagacacgggcactcctgagttatcgaacttgagctgtttggtgttggcatgttaatttatcttcttacaccacttaccacttccttaacatcaaaagataagaataattattattttccatggttgatgtgaagagtacaaataacttatacaaaatgcattgcagttaggaggtaataaatggcagtgaatgcccttattaatgttattctatcagtctcagctcagataccatctgctctgtgagctctgctctgaatcatatctgcttcttctctgggttccttgtgctctgttcttaactactttaaagcagtaattgttctgattctaattagtgatccttcccaataaaattttaattttgtagatctcttccccccaccccagcccccgcctaaacagaggtttcttacttttttgtgtacaggctacatcactggtcttcttttatttgtggctaaataaatgttgtgttagaagagtaaagagttcccagttacatgggatctatagttctacaaaatgaatgtatacataatccatgtaaatccttcacttattttaaaacaactttttaatttttaaattaaatttaatttgtgcatgtgtgtgagaccagagtgagaacagagatggcggcggtgaggggcagtggtctcaccatgttgcccaggcaagtcttgaactccccttcaagtgccaccctcctcacctggcctccctcaccttgcctcctcccctctcactcctatgccagctcctgccattccccaccccctctgtagactgcaagactcaacaagtgacttgctgagcaaactctgctaagagatctgtttagggacacaggaggccaagtacacaaaaaagcaaaagaactagcatgcctttttcaatggatgtctattttacagggctggcttcagattattgttatagctttaaataaaaggaccgttttgtcatctcggcccatggcctacattatttctttactgtccattgccctgggctcttgactaataatttaacagcaatttttttttaaattttaaatcatgattcattgcattgctgtaagagtaattagaggtaaagtagggctggaaactgcctgtagttggttacttactgagatcttagcatcattgtcaggtgagagggtgaagttttaattagcgctaagtgggatagaaattcaatgcactgaaactgcagtgtccaattcagtaggtgctagccacctgtaactgttgagcacttggaatcctggctagtcctaattgagatgtgttgtgttaaatacactggattttgtcgttggagtgggaagaacagtgcagaatatctgcttgactttttttatatttattacatgttaaaattattactatgattactatttgggacatactgagttaggtatatttaaaattaatttcaccttttcttttaatggggcttactagtacatttaaaattacatacgtggctcacatatttattggacagcacagctctagaagtttaggaagaaataagaaaaatattgagaataggtagcgacagtaggaagtttgacctcctgtaagactgattccaataaaactaataggtgatagttttaattggctttttcctactagaagaagtaagtgtactttacatgcctctttgttctccctctttccccttcaatttagtggttagcgtgtatttactacatcaggcttaatattcactaaacagtgttaagaagacttaggtaaatgattccctgatgaacacacttgatattcaaagcactttcctaacccatttttaattggaatagagtcaaaggtagatggcttattagtagtcatctcatttaaacctcgtggaattttcctgctaaatctcaaagtaaacaatttgttataggctgttttgtcaagtgcatggaagggacagcataagacatgtggtacttcgtttcaaaattgcttgagatggttttcattataatcatacattatttgcttctggttttccagaaaagccagctaaacctgtggttcatttagatataaatgaaatatcctcaaaggattgctcaaagtgacttatgcaacttgaatatatatttttttctgtagggtgtttattccaaattatctggccatttgtggcaatttgcagttttttagaaaacaccaaatatttttcaagttagagatgttttaataaaaacagtcatattgaactggaagcagccaaataaaatggtcctttatttcacagttgagaatttgaaattggaaggtaattaacatatgtaaggatgatgtatttgctgcctggcttataggaatgagccaaggtgttttttgagggatgttgttgctgtgtatgtcccacctattttgcttccttaatgaacaatgcaagtttgagacagaaatatttgagaacatttttatcagttgcgacattttgatagtgaacattttatatcttctgtcaacttaaaatgtttgcatcttctgtctgcttaaaatgtttaatttgttatagccaaataatttggctataattgataatttaatttatcaaattaaattgcttttttccctttagactttcttcagtcacatctgaataaatcccttagaagtaagctagatgtaatataatgaaatgcttaaaagggctgtgtatcttcatattacacttacaatgattttctcttgtgcccattatattctacctgcagctagttgaggtaaagagagggcatttaactgtcaagggaacctgtgaggagactgtagaaatctggaaagtctcttgggtctttgagggattttgggatgcagagagtggggctgggatctctggctaggttggagccagcgtgcatttgtatctttatcttggaagcaaacttagaatgcagagatagatgtggcctggatgctgctaactctagccaaccactaaatcttaaggtgggagagatggagcctttggctgggtgctaagctgctgtagctggttgaatgtagaggtcactatcttttctgaatatttgtaagtaaattaaatcattctttactcctgtatgcctgccaaccaaatgggaaatcgctatagaaaagatggtttaaattttagtctttgaagtggtttatgcacgtttctggaatcaagatttaacgcggacttggattggatattgaatatttttgatttgtctacttttctctccatagggagcttatagcttcattgcactgtgtgtggcatttgggtcctgtttgacagcaatgactgcctttctgtttagtgtctgtgtgctatgaagattgcacacaggggtccagatgcatcctgttttgagaatgttaatggatacaccagctgctgctttggatttcacccattggtggtagttgacccgctgtttggaatgcagacaatttaagtgaagacatatccatatatgtggctctgttacaatggtgaaatctacaaccataagaaggtaggggaaaagaagccagatgtgtggatgtgattaaacttcagagcttgttggttacgatgacattatatattctgtatcttgctttttactttgcaaagcattctatgttatctcatttgctctaagtatgtagatagggaactgatgaataaaatggtgagttaaatcacttggtcacaaaaaagtgataaaaatggggattacacagtttctttgactcttagaattttttctccttctccccagctttttgttttgaaaaaaattctaacatacagaaaagaacagaatagtgagcacctagattgaataatcattaatgttttgccatatttgcttgatttttctttctacacacacacacacacagttttttgccaaatcatttgagagtatggtgcagattttgtgacactcctaaatatataagcat

SEQ ID NO: 5 - DNA, 3945 bp, synthetic construct
  misc_feature 1..3945: note = Description of Artificial Sequence: Synthetic polynucleotide
  source 1..3945: mol_type = other DNA
gcgctctgtgtgcagccccctcagccagttggatggtgcttacacaaaaagtaaacattgtaataattcactttcgtggaatcaaatttgcaaaacatgcatgaaacaaattagagcggatcttccctacctagtctgctcagactcacacactgatctcctctggaaacactctcacagacacacccaaaataatacttcaccaggtttcttggtattccttaatctagtcaagttgacccagacaattaagtccacaagttcactccttgtcaacttggcacccatacatgtctccttaaatcatacttaatttccaaataaagacaataacaaggtaatattattgtcccacctaacattatgcaactaacatgatgcaactatcctgtgtgcaactgaaaatgcactaatgccttccatagaatttggctttcaggatttcaatatttgtgattttaatcttccgagatggtgattttctggattttagatgttatagatttcagatttaaggaatttaatcttttgggatttcaacattcaggattacagagtttggtattatgtctttttttattatcagcactgggtcaaatggcatagctgggatctatgttcccctgtaactggttccaatcccattttccaacttagttttttatcatttggttagtagtcataaggtactttaaaaaaggtctgatgcaccttggaaccttcagggagggactatattatggacaaatggaagttaacaaaagagtaataaagttcacagaagataaactctatcacaaaactctacctggagcaggtttttccattagcattcaatgcatccaaaccaatatttcagacttcatgccagcccagccactaatttaccttacaactaaggttattataaagatctaggagaaatggcaccatctttatttttgtatctcaacttagcattacgaattttatctttccttaaacaaaactgtgaagtgctgatcattgtaccctaaagaagatatgcagttggagaagatccaggcaacttaccaaagggattgggcattttctacatgaaaacagaagaataaggctgaaacattttaatcaggaagtgtttggattgtaatgttcaaccttgtgatgggtacagaagtataaatatagaattaattattgaaaaatcagaatgcagaaattgagtatcttcttgagtcaagaaagaggtaattttagagcaaatagatggagttattaaggaatagtacccattaaccctggggaggatagaagcaaaaaccataaataattctagagggatttagataaattcagtggtgataaagacagtattgttttattaaggttattcatttgagggatctatcaatcttttgaatgtaaaccacagagagcaaaaatgccacatagcattttatttagttggggttatttatgtaagaaatattttttgaacacttactatacagcagactctgtgctgggcacttgtgatgaatatgataaccaaggtctctatctaatatacatgtgagacaacaattataatacaatgtagggctatgtaaggagaaataaaggataataaggaagtacacgagagggtcttattacctacctctgcatcctcagggattttccttaaaactgcatctgtgtagactgcaacaatgtttacctacattgtttgctgctgtgggaagtttaagaagcagaaaggaataatgaaatctggcagatcaattccaagatggcctccggtgatttctgcctcttggtatttatcctcgtgtgcagcgtcttcctcttgtgtgtgcacagggtctataacctgcttctagccaataaaatatttcaaagatgatgggatgtcatttttgtgaatcagttacataagattctgacctcgggcttgctatcaaactctatcccttgttagttctgataaaacaagccaccatgttgcacgctgcattatggaggggctcacatgacaagatataaagggcttcctctgactagcagccatcaagaaactaaggtcctcagtgcatcaacccaaaaggaattctgccaacaactacatcatcttacaagtagatccttccccgggtgagttttgagataagacgtctagattttagcattgtgagagatcctgtagcagggaactcagctaaaccatacccaattattacatacacagtaagtgtaaagtaggagtctgtgttgttttaaggcactaagtttgtgtcagtttgttatatggcgatagataattaatataatgaggatgccaaaacatccccatgaaacacactgcagtcagtcttttgtgctaccataggttggataatattttcagtattttagatgagacatagttgtgaccaaaatggtggtgatgtgatcaaaagatgaagatgtgtttgagagatatttaagaagtaggattggcaagacacattattaatttgttgtggaagttgagggaagggagaaatctaagataaaactcagatttggcatcagtcactgagaagattatgatgtcattcattaagacagagagacaagaggtaggcagtggagaacaatgatgagtccgaattgcatgtgaaacattggagtgaagatatccaataagcaattggatatgcccatgcatctgaagtccaggagaaaataaactgagatgaatgaaagagcatgctgtgtattaaaaccatgcaaatagatgtgattttaatagtgaggaaagtaaaggtgaagagcatgaagatcctatggtaagttctgaagaatgtcaatctttaagggataaacagaagagaaggaggcttctaaaaagaccgagacaaacagataaaaaggcagaaagaaaagtagcaaaatgcagtttcatggaagacacttatcccccacaaaagtgtttcaggaagaaggaattggtaaacaatgtaaaataaaaagttaaagaagatgtagccttcagaaagtggtaatttttgagagaaatttctgtttttatagatggttatgttggaattcacattgcttgaggtggaaggggaaaggaacataaaaatgaagaaagttgggatagacaactttgtgaaagtttagctctaaaagggaggagagagatgctgatagccaaaaaggattataattattaaagactcttttttaagacagtaaatttaggattatgtttaaatgctgatgataaatagccattagaaattgagaaattgaaaatttaggagaatcataatacaccaaatttccagaagaaaaagcagaggatgtaatccagagaaaagtggagaactttgatttggacagtgtcagactcaatcctagacccaccatgattatacattgcaaaatagaaaaactattattttacacatcacttagccactttcagatctatgtttcttatattggactttcccaactgatctatgagataggtaaagcattcatagtgatccttacatttaccgatgttaaaattgattctccaaaaggttaagtgactggggaatttagtaactggagcttgaataatttattttctcttccatgatttttttttcactacatcctatcccatgccagggaactgacacagtatggtactgtctatacagatcattctgagaactagtaaaagtactgtatgaattgggacaatctgacaatttaaaatgcaacctaatataattaaaactgttaaggtggtttcatctctagactgcagatagttatctttcttttttgtcttagggtctttatttatttatttatttgagacagagtctcactgtgttgccgaggctggagtgcagtggcactgtgttggctcactgcaacctccgtctcctggattcaagcatgcgctctgtgtgcagc

SEQ ID NO: 6 - DNA, 3782 bp, synthetic construct
  misc_feature 1..3782: note = Description of Artificial Sequence: Synthetic polynucleotide
  source 1..3782: mol_type = other DNA
gagaatagatataatctctcaagatacttaatttccatgtacccatgcatgctcttatattttcaatgtataactatattctctaaaattacatttagattttagggcgataagaatggtaaatcagaaagcaacaaagtaacctgaagaaaaactaggcttataagttttatattgtctttttttaaaaagtaaacaagatacccaattgagggaatatagaggtgtgcaaatgttgtaaactttagtgcaatatagacctgggtttgaatctcacatttgtcattcacacccacaggtagtacactggcaagtctgaatattaccttgtcttaccatttccacacggataaccctagtccaagataacatcagcaaccaactggactcttgcaatagtcctctgccattcccaccactctctattcacattttctccttcaaggaacttttccatgcagcagccaaaaaaatttaaagcataaaacttattacttaaaactctccacttgctttccattgtaattagaataaattccacatttattgtatcttttcctccttgttatatatgtatttcagttaatgacagtccctggaatatgctaagctcattcttgcattaggatttttgcacagatattgtaatatctgtgagcaagaaagagatgaaggaaagggctcaacttacgccctcttcaggtaatggcatatttaatattttgcaaatctgttacctcatctgtaaagcttatcttttattatttccggagatcatgggaaagtcatcagaagtgtccagaaattatcctgggtatagaagctgagagaatggtgctattaattctaggcatttaaagattattaaattaaaaaattgctaatcaaaggtgggatcattgaattatccactgacatcaatattataaccatttttgaccatatacagtatgctaggcactgtattaaacactacagaagatataagaatgaatgaatataaaagtctttgcttatcatctgcttatcatttggaagacagaataagaacaacacaataacactactactaagcagaatatgtaccataaaataatcagaatgtaaagggtaaaggtttttaaaatggagggtttaataggtctgacttccacagtaagcaacagcagtttaaaaatatgcacatctgttcccaatccattagacttgcttctccttaattgaattgaaatataagattagttggttttggggatcagggaattgaggaaggcttaatgaaggaactagacctagaaaatacagcatttgagctggaccttgaaagtgggaaaaataatggaatgcacctttatttatctctttcttaatttagccatggttttactaagtaaataagatgagttttatgattttgcagaagtatgcctgctgaacattattgacctcatgacaatcttccaatatgtttttaaggaaaatagaactttatttttggagagaacgaccttgggcaactaaattaacctctttctcacctataaaattctaatttgtagaactgttgcaaagattaaaggaaataatgcaaggtgtctggtgtataggcacctgattaaagctagctctcacttttacttcttaataactgaagaagttgtatattactgaaagtaagcagaattgtggaatagttaaaactctacactctgaaatcaggctgtggtgatcagatggccttcgaattctgggtctgacacctcttgctttgtgatcttgggcaggtaacttaacatcactttgccttacttccttcatttgtcaaatggaaattataatatatcctaactaagagggctgttgtgaagattacatctgataattcatattaagtggttaacatatagtaggtgctcaataaataattatttataattacagtaataatcattaataattatataagtagaattgaaagctaacactaataatatccttaagtcataggggttattgtcagtctaataatctatagcatgtgacaggccaacacatgcccggtcaatgaatatattattctaaaaataaactcatctaatcacatatacagacctgaagtgctatttgaagtacttcacttgatgttcttgttgtatttgatcatgtttccagtgtttgcttttgactttactcatatttttataattcactatttatctctgatttttaaaagtggtgagggaagtcagttccaggcggtgatggaagccaaggcctctgatctcaaaacagctatggaagatgaaccaaaaggaaaaaacaccgtattagaagagaatgccttcaggggtcctggagaattaaggctagaattttgctattttgagtcaggcaggaaaaaaagaggtgcagattgagaagtagaaaaattattgcttgggagaggaatttcctgcttgactatttcctcttaaatctcattatgtaagtttactgattgctttttctaaactcaaatttaggtcccaagtataaaagagaaattctattaaaatatgtatagattatacacctttggagtaaagtggtttctttctacatgtttataattatgttctggcttatgcagaatagtctatagttcgaacattctggaactgagatttatattccctaaatatgcatgaataagtatctggcccacctcaataagaaatgaggtttgttgatttgatttcccttagccagcttgataagcagaaagactgtcactggaagaattctggaagaagatattaaagctactgcacatatctaaatgtaacatatcaaggatctgcctgtttgctcaagaaagggaagaaattcattgcttaacctcagtgacccaaataggctttctgcttatcttatacatcccaagttacctcccagtaacttgaacatatcttcttttcaagccttccaaattccacccaaattgaaagacagtgttcttggtagatgtcttattttcgaggatcgttggcttttcacactcagtaatcaccaccacaggtacctttccctcatccacacactcaaatattacctatcatttaatctaacctcaattcaaatgcaacttgttcttcgaaaccttttctaacattttcattttaaaaaatcccttcctttaaagacagcctcctgggtcttcatcagtaattctaatatggcaatatgcaataaatatttattgtgtacctaaaatgtgccacaagctcagtgctagggatatgtcagtgggtaaaacagtcagaactccttgtaaagtgaataaagttaaaattgcttgttagatagtggtaaatggtaaggagaaaagtgtagaagaggaagagaaaaggaaattggaaggtagaaattttatgtggttagtggaggcctgtcagggaaggagactcaaatctgcaggaaatggggaatgacagacaaatatctgaaagaagaacattcagacagatggaagagaaaatgaaaagactctgggtgaaagtgtaaataggaggaaaattaagagaaatcatacaggtgaagagtggggagtgggaggaggaggagcaggcagattgtacatgtttttcatggccgactttttctctgggttaaaagtaaaccactgaaggctttgattaccacagaggcatggtctaactcatattttagtaacagaggcaacaatgcagcagtgagaggataaaagttctggaaatattctgaaggcgcgctctgtgtgcagc

SEQ ID NO: 7 - DNA, 3383 bp, synthetic construct
  misc_feature 1..3383: note = Description of Artificial Sequence: Synthetic polynucleotide
  source 1..3383: mol_type = other DNA
aaactatatcacaaaatctccttacctcatctttttatctacctctacctctttccatgtattttttgacatatctctcaaattacatgtgaattctgtctgggctaccctccatattggtcccaggttatatatctaaaatcttccattctccatgaactactgaaattaagatattctggtaaatacgtattcccacaaagattcactgcacagagtttaaattatatgtgtgattcttctatcaacagcttcactaacttacagagttaaaactgtcaattttgccttcaaaacatctcttgaatctattcatttatttccatttttatcaccctttatctttaggctcacattatctctgcaatggatacttcaattgctccttaaatggtctccaaacaccactctgacgcaactccaaactgttctccatactatatccaaggcaaagattttgaaatgtaagtatgataattgttatattctgtctaaaatattttgttgggttctccttgctggtataataacttgaccaagaggctttcacataatttatccctaagttatctccaaagtcttattgcccttgtgcctcctcgttctctctcagtcaagatacaccagtcttctttcagtcttttctactttttttctccctccatctgtgtgttgatctccctttctgaaatattattccttgttctttttgcgttgatgattcagactctgaatttcattcattcgagtatcacttcctagggacacttaccctggcaagtggaaatgtttccatttttaactgtcacaatagctacatctcttgtgtagcacttacatttattatgtcatatttttaagagatctgttttctctaacagactgtaagccccatgaagacatcagtagtgtcttttgaacatttgaaagtacccagtgcccaggtgaatatatagcttagagtagaaattatttgattgccaaaaagtattaatattccttgatgacacaccaattccaatctcatgaaagtgacgctaattatgtggctcttgcttcagaatatttggaaggtcctctctaattctgtatagtacaagtttttgagttttgacatttcacaagttatctccgaagcctttgaaataacaggaaaaaaattcaagacttccaatacaggggatttctcccagaagtagcttcttttagaggctcttacccaaagtttcagagctgtttattgtactagacagtggtctaaatgtacaattaccattatctaccatactcagtgtatagaaaatgtacagttcaagttacatcacaccaagcatccctacactttgaataaagtaggagataaacctgcctataccaactattaaatctattctcttcattctctgatcacatgcttaaataaatatccagtaccaaaaacaataatgacaacaagaatcaacaatcttcagactctggacaaaaagtatcttaattcagacttgtggaaagtaaataaaacacatttctccacttttccaggtcacaattttggaaaaataaatatataaccaatgtgtactttaataacaaaactacatggaatctgaatgtggctccataagactttcaggacttccaatgaataagcatttgacttgtatttatatattaagaaataatgagagaatctgtttctcacagactcagtcttaaaaaggcatgaatcctcaaggttgtgcacttaaatgacccggagaatgaatgcctcattaaattttgcactctagatgattgccttgcttcacactagtgctgatgctgcctgaatggcatcatcgaatggtattttgaggagtttataaaagctaattgatagaattagtacacataggaatatttacgtttgaaattattcttgaagatataattttactatgtttgatggtgaaagtcaatgtgaacaagccttttaaagatagatagttttaaaagtcaatagaatgatttctgcttccaatacagatagtgtaacaatgattcaatctactctactacctgaaacaattaaaaacttaaaaaaaatacatgaggcaaaagttttaagacataaagcatcaggcaagaaaggatagtgatcgctgaaaagtgaaaaacaaatgaaatatgagttattattgtttcttataattgctgggagagtttttctgagcaatgccatgaaagtgtaaagccaggtagaatgaggaagacccactaagttgagaagaaaaagctgacagtccacagagaacatgacattagagtttacaggacagtactggagatgagagatatgcagagagaaagtgtctgttcctactagggaaacgtagatccatgggacattgggtagagcatccaagagtgccttatcttggaagtggtacagtgatcaactattgtattgtgagtggaagagtttcagggatatgagatgtttaatactaaaaacaggacagtcacagacaaaccgggacaattggtcactacagttgtgagggaataatttgcccccaactaatgataatatcttattgcttaatacattttaaacacaaccccaaatggttacactgtttcaaaattactgtgtcacaaatcaaatctcaataataaatatatatggaaatcctatatctgacaacataaaatttataaaattagtaattggaagcaataataactgattgtccccaaataattgtccccaaaacaatgtttgttagataccaaactgtaggttgagaatgctcagagaacactgagcaggataaaaacaaaccaacaaaaacagaaacaacgacaacagcaaaagtaagactacacctaggcatatcatatgcaaagcacagaaaatctaaagtaaataattcttgaaagaagaaagaggaaacaaagcattaggtacagggagtcaacagtgagaataacatctgacttctgctaatcatgtaagcaagaagagaagagagcaaaatatttcaaatgttgagagacaaaaacaaacaacaaaaaaatccacctagaattctgtattctgtggaattatccttcaaaagttaaggagagatgaaatctttctgagacaaacattgagggaatttgttatgagtagacttatcttgcaagaaaattttaaaaagttcttcagggataagaataatagggaagaaatatttctacataaagagaggaagagaattagagaaggaataagtgaaggtaaaataaaaacattttttactcttaattgagcaagcagataacaatttgttaaaatagtaatattcagttatgtattcacttatgtatgcttatgtatgtggcgctctgtgtgcagc

SEQ ID NO: 8 - DNA, 3310 bp, synthetic construct
  misc_feature 1..3310: note = Description of Artificial Sequence: Synthetic polynucleotide
  source 1..3310: mol_type = other DNA
gctgcacacagagcgccgtgcaggtttatgtgggggagaggctgtcgctgcgcttctgggcccgcggcgggcgtggggctgcccgggccggtcgaccagcgcgccgtagctcccgaggcccgagccgcgacccgcggggacccgccgcgcgtggcgcgggaggcgggggacgcccttcccggcccggtcgcgggtccgcgctcatcctggccgtctgaggcggcggccgaattcgtttccgagtccccgtggggagccggggaccgtcccgcccccgtcccccgggtgccggggagcggtccccgggccgggccgcggtccctctgccgcgatcctttctggcgagtccccgtgcggagtcggagagcgctccctgagcgcgcgtgcggcccgagaggtcgcgcctggccggccttcggtccctcgtgtgtcccggtcgtaggaggggccggccgaaaatgcttccggctcccgctctggagacacgggccggccccctgcgtgtggcacgggcggccgggagggcgtccccggcccggcgctgctcccgcgtgtgtcctggggttgaccagagggccccgggcgctccgtgtgtggctgcgatggtggcgtttttggggacaggtgtccgtgtcgcgcgtcgcctgggccggcggcgtggtcggtgacgcgacctcccggccccgggggaggtatatctttcgctccgagtcggcattttgggccgccgggttattgctgacacgctgtcctctggcgacctgtcgctggagaggttgggcctccggatgcgcgcggggctctggcctaccggtgacccggctagccggccgcgctcctgcttgagccgcctgccggggcccgcgggcctgctgttctctcgcgcgtccgagcgtcccgactcccggtgccggcccgggtccgggtctctgacccacccgggggcggcggggaaggcggcgagggccaccgtgcccccgtgcgctctccgctgcgggcgcccggggcggccgcgacaaccccaccccgctggctccgtgccgtgcgtgtcaggcgttctcgtctccgcggggttgtccgccgccccttccccggagtggggggttggccggagccgatcggctcgctggccggccggccggcctccgctcccggggggctcttcgtgatcgatgtggtgacgtcgtgctctcccgggccgggtccgagccgcgacgggcgaggggcggacgttcgtggcgaacgggaccgtccttctcgctccgccccgcgggggtcccctcgtctctcctctccccgcccgccggcggtgcgtgtgggaaggcgtggggtgcggaccccggcccgacctcgccgtcccgcccgccgccttctgcgtcgcggggcgggccggcggggtcctctgacgcggcagacagccctcgctgtcgcctccagtggttgtcgacttgcgggcggcccccctccgcggcggtgggggtgccgtcccgccggcccgtcgtgctgccctctcgggggggtttgcgcgagcgtcggctccgcctgggcccttgcggtgctcctggagcgctccgggttgtccctcaggtgcccgaggccgaacggtggtgtgtcgttcccgcccccggcgccccctcctccggtcgccgccgcggtgtccgcgcgtgggtcctgagggagctcgtcggtgtggggttcgaggcggtttgagtgagacgagtcgagacgcgcccctcccacgcggggaagggcgcccgcctgctctcggtgagcgcacgtcccgtgctcccctctggcgggtgcgcgcgggccgtgtgagcgatcgcggtgggttcgggccggtgtgacgcgtgcgccggccggccgccgaggggctgccgttctgcctccgaccggtcgtgtgtgggttgacttcggaggcgctctgcctcggaaggaaggaggtgggtggacggggggccctggtggggttgcgcgcacgcgcgcaccggccgggcccccgccctgaacgcgaacgctcgaggtggccgcgcgcaggtgtttcctcgtaccgcagggccccctcccttccccaggcgtccctcggcgcctctgcgggcccgaggaggagcggctggcgggtggggggagtgtgacccaccctcggtgagaaaagccttctctagcgatctgagaggcgtgccttgggggtaccggatcccccgggccgccgcctctgtctctgcctccgttatggtagcgctgccgtagcgacccgctcgcagaggaccctcctccgcttccccctcgacggggttgggggggagaagcgagggttccgccggccaccgcggtggtggccgagtgcggctcgtcgtctacttgtggcccgcgcctcccccttccgagtcgggggaggatcccgccgggccgggcccggcgtcccagcgggttgggacgcggcggctggcgggcggtgggtgtgcgcgcccggcgctctgtccggcgcgtgaccccctccgccgcgagtcggctctccgcccgctcccgtgccgagtcgtgaccggtgccgacgaccgcgtttgcgtggcacggggtcgggcccgcctggccctgggaaagcgtcccacggtgggggcgcgccggtctcccggagcgggaccgggtcggaggatggacgagaatcacgagcgacggtggtggtggcgtgtcgggttcgtggctgcggtcgctccggggcccccggtggcggggccccggggctcgcgaggcggttctcggtgggggccgagggccgtccggcgtcccaggcggggcgccgcgggaccgccctcgtgtctgtggcggtgggatcccgcggccgtgttttcctggtggcccggccgtgcctgaggtttctccccgagccgccgcctctgcgggctcccgggtgcccttgccctcgcggtccccggccctcgcccgtctgtgccctcttccccgcccgccgcccgccgatcctcttcttccccccgagcggctcgccggcttcacgtccgttggtggccccgcctgggaccgaacccggcaccgcctcgtggggcgccgccgccggccactgatcggcccggcgtccgcgtcccccggcgcgcgccttggggaccgggtcggtggcgccccgcgtggggcccggtgggcttcccggagggttccgggggtcggcctgcggcgcgtgcgggggaggagacggttccgggggaccggccgcgactgcggcggcggtggtggggggagccgcggggatcgccgagggccggtcggccgccccgggtgccgcgcggtgccgccggcg

SEQ ID NO: 9 - DNA, 3278 bp, synthetic construct
  misc_feature 1..3278: note = Description of Artificial Sequence: Synthetic polynucleotide
  source 1..3278: mol_type = other DNA
gcacagaaagacaaatcctgtatgatatcagtcatgtgcaatctaaaaaagctcatctcatagaagtagagagtagaatactggttaccagaggttggggtagggagagacaatgggagatggagagagattggttaaagggcacagggtcacagatacataagaataaattcatccttgaatacttaaccctctgccctacatctgtcactcctacatccatattcattgctaatcctggggctaactcttgattgctttcttctcactactaaccttaagaaaggaagtaaccaaaatccaatacatgagcaactgttcattccatctccaatatctttgttcattgtccactttatccacccagtcagggccaccatcaaacctcacttggatgtcagcaaaagctccctggctggtctcccctctccattattgctttaatctagtctccatactatacacagatttacattttttgaatatatatctaattgtccttccctttttaaaaatcttacaatggcatgacatctcaattcacgataaggaaattggttcttcacattccctgtgcactgtacacatcgcctgcaattgcccttcaacacagagagcaggcatttcattagctgaccttcccacacacattcttgcaaagaggaaaagttaagcagggtgtttggaggcgagctgccatcatccaccgcctttgtctggaaggaagcgcagggcctcacacgcgggatccatcggaagcccaagcattgtcaagctctgctgctgcacctgggtcagcaaggtgggctctgccagcgaaactcgttagaaacaatgcaaatggggagtaaacatgacctcgcccatgaaggggaagctgtggtcaaaagcattttgtcccggaaccccgcagccctccccacactctgggcgcggagcacaatgattggtcactcctattttcgctgagcttttcctcttatttcagttttcttcgagatcaaatctggtttgtagatgtgcttcgggaggatgggggtctcttctccgagaagccgggagcctgttgggcagccggcgcccggtctccccttctgctgcggaggatccctgctggcggtcgtggtgctgctcgcgctgccggtggcctggggtgaaacgctggggggcgtggggaggcgcccgggctgacgaggcacccagggccccgcagagaactcgcgtgccgcgctgggctgcgctgctctgcgcgcccgggtccaaaggcagcgcgatgggtgggctgagcgcgctacctggcagggcggcgggtctgggatccttctgcgcactggagaccctcgctgcctctaggtaagcgtggagttcccacgtgcaggggcttaagtcgtgacgagcgcagtggaaggcgcagatgctgagcgggtgccgcacgaaattccttgcctttgtgtattcacagcctcggctggctatagccgagcgtggcgtcgatcctagcgaaacgggacttggggatccgacaaacctgagttctggtcctagaaacttaactgtgaggcaagttagcacacctaagtctgtttgctcttctgtaaaatggggacactggtatctctgcattgtggagttgctgcctcagtggcataaagcctgtcgagtatctaacacagggcctgtccccgagtccatttctatcccccaaccgttacctctgcactttgctcccagtggtgtttagacaagcagtcctagggatgtcctgcatggaactgtcctcgtcccctaccccaagccaccaccgccatcatcatgatgcacttgattgacagcatactttaagacagatgcatgccaggcacttggggattagaagagcaagggaagccccagaacatgcaatgtaaccgctgcaggtagaagggacagtagatatgtttacaatttgcattttagtgatgtgtttagtacaaaataaagcctattataactactatggaaattttgaggccacatctcttcctttttttaacttcaagtaggtaaacatcttcagttagaacccttctattattagttttgggctccccagaagtcttcttggttgcctagactcactggcaacatctcacttgaagtgacagtcttggttgttttggtcctgtctcttcctgacaactcagggttcgtccttctctgccactagacgttttgcattcattatttgagtgttccttcttctctaaaagagtaaggggaaaagaaaaccaagttcccccaagagttgttattaatatttgatcttcttaggcaccagaaagtaacctgtctagtgaagagatatgataaaacttacaattttatttttaggagagaagcatgcccagtaagttaagcaatctgttgtcagtgcttactgaggttctcacaataacctccaaatgtgaaacagcctaaactaaactacctagaaattttgttgctggagtaatttcaattttaaaatgcttatggatgcttccggtgtgcacagtcctttggaatttaaaagaaatgtaagagaaagagctatgctcccaaggtgtatgcatatagaagtaggtggtggagttttatgaaatctactttttaggaagccagtgttctggtttttccagactctgctacttaccaactggggctgtggacccagcaacttaagtcacatcactgaccttcagtgtccacgtgtataaaatgagcatgactgacatcctgatttctgagagaggtattttgaaaatcaggtggggtagtgcatgtgacagcgttttgtaatctgaaaaccctcatgcatgtctgaaaaaccatgactaagcagtcgtgcaggactgcaggatcactgaaaagggagaaatctcaactcctatgatcaggaaagggtgagggaaaagagtatgactttactagcacttgaagagtgaatccagaaacaggttgcataggacagtttatgggaatatttatatataaaaaataacagaggaactaggattgttttgtcattagagggtactcctactacccatgaagtggtatggtgctatttgaaagagaacttagattagctgcaaatagatattgcaaacttagggcaactactgaaaaaagtgaaaaaaagaagtacaattgatatgccagtaaggaagagtgaattgcatcatataaaatgctcagttaaaacaataaacggggccaggcgcagtggctcacacctataatggcgctctgtgtgcagc

SEQ ID NO: 10 - DNA, 3266 bp, synthetic construct
  misc_feature 1..3266: note = Description of Artificial Sequence: Synthetic polynucleotide
  source 1..3266: mol_type = other DNA
atattagttggtattgttctcaatagtcagggatgttcaaataatgttgcaggaagagatcagagttccgcttcccttttgctgtcagatctgtaccttgaggcttttttatatcctgtgcagcagttttggttagataccagaatgttccatgttctctttccactgagtagtgggaaccagcttgcagttggtgcctcaagtaatgtgtctctatattcatgaaaatctcctgggctacttgcagctcttcctcaagttttcaatatattttaaaattctacctcacaggaagccattcaataaaattctctgaatctgaagtaagtgagttggatttgacagagctaagcctcatccatgactcatgagtatccatgtatcaaacagggctttgtacttatttcaacagcacatattttaaattggatcaatacagagcagataagcatggttactgcctagggatggcacacaaattcagaaagcattccatattttgcatagacccaggaaggccatttgactatttgttgagtagctccgaggaagcagtgtgaggaaaaccaaaacaggtgacacgcaatattgaaactgtgattatcactgtgaaactattgatgtacagtgatctctgaaatgggaacagagctgagtaataaggggatgttacatgttgttagtacatgtcttggaaatgagaaaatgtcaacttgcatttccttcatggaactgaaaaacaatcaaggcagggttttttcttgtctgttagttggagaggaccatcgatatccagcagccaagcacaaatctgctggctcagagtttgaggaggtagagaaggagtggtagttttccaagccaggttttgacacctattagttttctgcccttggtgtgattgatgagctcagtgatgagctcattaaatttatatgtatataaatttagtaataagttatgaattaggtaaaatgccctgaattacaagccacaacgaatgcaagtaataaccaaaattagcacttaataacattttctgaaaactgcaacatttgaatattagaacttatagaaaaacacacaccgagcattatttgtgattccaaaatggtttcagcaagaaggttcaagaataaattatttcattgctttattatttctctgaacatttaaacatgtaatctcattacatcttccaaacaacctagtgaagtaaggtagcagaatccttattttttagaagaaaccatggagcctaagagaagcaacttgtctgaaaacaaaatacctacagagcgaagtattttggttacagagcgaggacttactctgagggcaggacaatttgcatgatatccagctaactagaggtaatttactcagctgtgcttcctccatttatgagtacttcactttcttttcttctttaattataagcttaataagcttgtaaggtttaaaaatttgaagtgtatgggacattaaaattctgatactaggtctgatactgcctaaaatgtttttggaatttaatatgtttggtaaatattttttatttcagtattaaaatagcaattttatttattactttggtatatgtagaattcaacaacaaattttggaacataaaaagaagatacttaaaaaggacaaacgaggtaagtcttctgagagtgaatttcttacttctcttggtggtcctactcttgataagaaaataagaagtaagacgtaagattaaggtagtgccagtcaaaaaagaccagtttaaaaatatgtataaattcaatgtgtatatatgtatatacatatgtaaattaattttttaaatataacttctttagtttgaaattcagatttatttaagaaggtagttatagctaatttataatctcaaacattatggtctaaaaacattcatttatttaattatgatccctaaaaccctacataatatttttgaataaataagaaaaaacatttttaagttaatatgttgtatgtttcctctatagtcacattataacaaattggacttgttatacaaatggatcttctatttcatttttatagtaaattgtttacatttactaaacaaataactacagttgacccatgaataatgtgagggtaacaatcctgtgaggttgacaatccgagtataacttttgattacttcaccttagctagtaatagcccaccattgactggaagccttcctgataacataaacagttgatgaacacctattttatttgtgctgcattatgatgtactgtgttagtacaataaaataagctagagaaatgaagctgttagaaaggaaatcatcaggaaaaacatattgacttttcataaagcattagtagttcctggcaaaggtctttatgatcttcaggttgattaggctgaggaggaagaggagaggtggatcttgctgtctctgcattgcagaggcagaagaaaatctgcatataagtgaatccctgcagttgaaacccttgctgttcaagggtgaactgtattacatattgatttgtgtcactaagaaagtaactatctttagaaccaggaactcagcaatccctttctggtaccataaataaatggcaataagaactgtagaactgaaccagcgggcacccatacaaataggagattattttttttaagatagctactgagcacagaagatggaaaagcaattcctctgtgagaagcacaagttatattacatattcttacacaagcaaaatgatttcatctgtcatagtttacatgcatacacatacacacacgcacatgtgcacacacgtgtgcacacagacacaaagttaaaagtcctgctgattcttaatgaccaaatccaactgttcatagagagcggtggataacacatcctactgtttggatgcaattcttttgactttttgacttgttttgccatgaattgcctttaatgggtttaaatcatgtttttagttttatgagaaacaaagaaaaagattagaagcaagtaaacaggaactctatggtcagtagtagatgataatagtatattcaataatcatatgtttttctccagttatacaatttacttgaatgatgcacaattaatcaattattattatcatagcagatggggtctctctatgttgcctaggctagaatacagtgtctgttcattggtgcaatcatagctcactgtaaccttgaactcctgggctcaagcagtcctcctacctcatactcctgagtagctg

SEQ ID NO: 11 - DNA, 3222 bp, synthetic construct
  misc_feature 1..3222: note = Description of Artificial Sequence: Synthetic polynucleotide
  source 1..3222: mol_type = other DNA
gaacacaataattgcacacaattttacctgtgagttaaatttaaaaacttaaataaagacttcaaatttaagctgtccaaaatcaactgttaccaaactcctcgatcctgctcccatcaaatgtattatcttccagtgttacatgttttagtgaataccatcaacacatattccatcttatacattaaaaaatccatagttcctttactccttatccagacttactaactttattatgtcagcatcctttaattctatcagtttctatccaccatgtcactgaagttataaaccattgtcttttaactagattgttataactgtctcctaaaatttctccttgcatctaaaaatatggattttctgacaaaaaaaatgctaaattgtgtcccattgctctgaaagtctgaaagtccaaagttcatggaaaagcatggaaaatctagcatggcccaatttatactctgtggccctcatttatacttgcccttactccaagctcttgtgctttgttcctctttgctctttaggcttaagccacattaagatttttgctgttcataatacacactttgtatcagcccacttccattataactgccattttctctatttataatgagttttaatgttaacttttcttacttaattttactcaaacatattttacctcacttatcactagatccaaccccttatattttcatagccctgtgcttctttattttaacatttctcagactttatattttagttaatgtctttttatccctactcaggtataagctctatgaggacatgagctatgtctgtttttctgtaacattgggttcctggagtctagaaaacatattaactacatattatcattgaatatgaaccaactctatcaaagacagttacttaagaaaggagatttcaattattataagaaaatgtatataacagattgagaatagtatattgacaataattagcaaatattaaataatataaataaagatgtgatcaacaattaaatgggagcccaactatctataatttagataaaatctctgtcaggaatttttgtagttatgaagacttcaaaaggtcacaattacataacttagccaaaagagcataatttagctaaaattacatgattacattgtacaactatagaatgaaggacaaaactaagataatttaaactcataatgttttgatttaaaagttataataattagaatcttgtcaggaattttggaaactaaaaaattctctttaacaatttccatacaatcacattttgtatcacatatttaaaaggcatcacatccaatataatagtaatcaggggtctcaaacataaaaaaaaattagacacaaacttgatctctacagcacctacacataggcaacatgcatgcacaaatgacaaaatggcctattgccatatattggtatattttccctgaaaatgaatgaatgaatggtgaaaaatatgttttcttttcccttttatgatacactatacatttgcaaagcatattcaggtacactaacataacatctcactctgcccgagatatttggtaagaaagacgagaagaaactgggatattacagtcattgcttagttagccattatgtcaagatgaaagagaaatgagtaataactatctcaatcatagaatgataacaattactttaagatattgtatttatcaattcaaactgataacaaatgcccaatttacttctgttacatacctcaaaatataaatgtgactcttgaggtgtctatcaactgatttaaaataagtgaaacttcagtgctctaagacctcaacacccagtgaaatcaaatgaagtcacattagtgtcaattttctaatatgcattttacttttcccactggcatatgtaggcaattaaaatcttcatcgtctaatgaatagacatctcctcatgtctatttctgaaagtgccgaaaggatgccttatgagatcacacagcaatcaattggttattctcacttccccccacagaatgcatctgccatgttcttcctgttcatcttaggtgctaatacaataattccttactgtaaaaactttgaaattacctcatggttgacattgccatctgctgctcacctggaagttactgagcaatgttggtgtcaaagtcaaaatagaacaaaataacatcccctaacttcatgccattctttgtcatttggcatgtacagcaaaacttgtcccaagaaaacaccctgtcctaaactatacttatttattatatgtttttgcttcaaactgaggctccagccttgtctaaggttctggatggaaacaggtgctaccctacccactctgcactctgtttcactcactttcctccttattgtccacaaatacactcacttacataataacatcaaaatactttggctaaaacaaaaggctctatggataaccaatggctcaaatagatgcttgggcacagggtatcatttaatgcaactaatgacttgagaacaaaataaggaaattctctgactatattttttagtacattattttagactagtgtcaaacaatagctagctaaattgaagttataagtgaatgtgttgttttttcttttcagattttgttcattctaagccactaatgagttgacagtgagccattaggatatactgaatatggttttgttaatacattctttcagaccagtggcatacaataggtaacttgaagtggagtaaaacatactttatgccttgttttgtttttaagaactgaaataatagaaacagaagagttggcttcctctattaaattttatagacaaggaaaatacaactcaatattgaaaaagcatttaattgtgaaatgtgtcagagatctaaacaggtatctgattattggtttcttataaatgtgacttttatagttttcagaattgcattcattatttttactttgaatttataggaatggatgtgaaattaaatagttaatgttagcacaaattaatgtattttggtatgcttaggccaagagtatgcattaatgtatataaataacttgatctatattctagagtttcagaggtcatcagtgtctaacatgtatgcatattgtgaccacctggaaagcatttgtaaaaataaataataacatttatgtaatttctcattaatctcctttgtttccaagtgtaaagat

SEQ ID NO: 12 - DNA, 3207 bp, synthetic construct
  misc_feature 1..3207: note = Description of Artificial Sequence: Synthetic polynucleotide
  source 1..3207: mol_type = other DNA
ggggacaggtcaggtgggttaggctggggctctggtgaggtcaggccacaccacccaggggagacaagagctgagacacctcacttcccatgtctctcttttcacgtctcttagggcagtcttcccccagctgtgtagctcaggaagaactctcagggttcatgtggagaaagaggctgtgaccaccccagaggcctcttctccagtgagaagcagggggacaccccggaggagcagacattctaaggctgcccgtgagccctgcaactggctctgttcccagcagggaggtggagaggatgccactcaggaatcacctcggagccccgagaagagggaggtctagatgttgatttcttgggaaagggctgtgagctcaaagatgggcttaggaatatggatcacagaaaaaaatttgatgtgcaaaaatgaaaaaaaatatgacttttattaaatcataaaactgtgatgaaacagctgacatcagtggagcagcctgcacattttccatccaggcatcgttgagtctagatacgtgtcccaattatagaccatccagtcatccagggctgccacttgcagatggaaaattgtactattttcaatcatgcactgaggtttgaattacttcacagactgaaccaaacaaacatgggctccattgaagagtgtctggcatttgtttcaaccacaagagaactttccccagctctccctcattctcggttctctcctgcaagccagcagccctgcagtgtagcctgcatctcccatgcatccacccatctccttccaagggctttccaccacaccatccactgtttttgagagcactggcaggctttcaatttgtccacattctgttgttactgaagttaggatttttaggactaattaaggatcatattttatgactgaattccagtgccccctctctcctgggacagagcacgtaaccaacattctgcatgtggagacaaagatgagcttttttcttcctcagcctaggagatgagcgctcagtggagggttggatagaagcttcccaccttctcagcactccagttctggtggggagaacctctgccataggagcagagctagaaaccagggaccgaatgttcccagtgacactggacccagggtagagcctccatccacgagtggggctccatggaagaagcgagtctctggctctcagtagcttttgtccagaactgagccttaggatcgtgtactgtgggcagagtcagagggccaatgtcctggctcctggggaacagtttcctctgaagggagctgggtagaaggtgtcctgtcttcttggctacatctgtttgcagtggagtttacatcatgctgagttgggatgtggaaggaaggaggagcatcttagatcaattatgatggctagacttactgaattttgtagattttcttgaataaatgtttcttcacttgctgtatgctgtgagagcctttccaaaccctgtattttttcaaaataattttcactggtctcatgagggcatggattcattgagcccctcatgctatcaaagagaaatagaactttttttgttcactttttagagaacatccatgggttataaaacaatgggttgacttctcttccaaaactttacagataccgtcaattttcctcttgcttgtaaggttttatccagaagaatgctgtcatcattttttctgcttttttggaaggaatgccccttctactcacctcaaattgcctgcatgtatttctatttttctttggttttcagcagttttaataagatttagctaaatgtgtgtggggggagcagggagtgtcattctgctgttctgtgttctctgagatgcatggattcacggtttactctgtctccattttggggaacacaattagaaaaaatgtcagtgtgagcccagaaacaagcctccctgaagtgggcagaggaccacctgggggcgctcaggacccactgagcacaagagccagccccagggcaggtgcagacgggggttaagatctggtttcccgtcagccctgtggcttcctctccataaaacagttccctcgggggcacgtctctggattccttatcttgttcttactgtgaagtctctgaagaataaacatttgttgtaacaagagaaaaattttctcccatgcaccaaaggcagagtcacctacagtcaattagtcctgtttctcaatgttaataaactatcaatgtttctgaaggtacattgtacagaacccagaattcagccacacaatgtatagccaagtgatattgacaaacttaacaaaatatacaccagggaaaggacgtcccattcaataaatggtacttgggaaaatggatagaaacatgcagaagaacaaaactagatccccaccctcaacacattagtcaggtctctaaaatgcaggagtacatatctaaaatttattattttattgtgcatttttacgtgttccagaaggtgggagaaatttctttctgtgaagagcatcccaaagtcaggcactcctctagaacacgtgtttaatccttgtctttggcttattgatgagctctgttggctgcaataacttctgccatccgggctgactttgcatcatgtagaggagcaaattctgaatgaaagtttgcactactcaattgagtgcataacctacagttttgttactgatgtatgattcatcagagatgatatcagatcaaggatttcaatgagaatctaatctaaaagatgtaaacaaattttcctaatttagataaaattactgtgagcacactgctagtattcagccatgtctcctatcacattgaatctacactaagtttgacctaaaagctagcacttgttctcatgttccaatatgttatttttattttaatgtattcagattactatgtgttgctattttacccaaagtgaaggaaagcaattttaactgactgaaaatgagaaaaagcacaacctaatgaaatggaagtcaggacatgagtgtctccagccttgtctatttcaaaaattcacgtacgcagggggatttctttcctcaattttacacagagaaacttccaaaatgtttgtttcctctcccatggactctatcatcagtttctatgtcagtttgcttagaattttggcctccagctccaaccaatttggcgctctgtgtgcagc

SEQ ID NO: 13 - DNA, 3166 bp, synthetic construct
  misc_feature 1..3166: note = Description of Artificial Sequence: Synthetic polynucleotide
  source 1..3166: mol_type = other DNA
atcattcaaaacatacactttaaaaataacaagtgattctacagacctgctgcttatgaattagacaggcaagccacttatcctacataaatttgtttatgcatctgtaaatttagaatagcaagtgctgacttccagaataagggttagaaacaataatgaatatgcgagcaatttctaaattttaaggttatttagaaacacaagcattttattataaatgctagtcctggaaaattgatgtcatgtttgttatgggacttctattacctcaaagtcctttccatgtcctatcctaaatcgaagagcctccagtgacatgtcttcccgaaccttctatttttctttttctttctcgtctgcatctgtttctaacagatgatgtaacacttacatctctttaagaattctgctgggctgcttagcaggctcctctgaccaattttattgactgttgagacagatttgaaaaaatctgagttttagaatcaatattttaaaacgcagtacctttccaaaactctgtaagctggcccacagctattatggttgataaagtgctgactcacacctttttttgtggaagaaagaaggccgtatgttttaagagacacagccattagattttttcataaatgcaggtggaatctccactttgaaaagtaaatacctccagcatccccccaaaccaatcatttcatataactggccatttttacaagactccaaatacacattcagggacaatttagaggtggaaacctgtgattgttcaaaccatttgatcgctttttcttttaaggagaattaaggcagagaaatctgctccgtcccaagctcaggtgggataccacgctcagagtgggctctttaggaggactccatgcctgcaacagctgccaacagggagcacgcaaaacaggtcatccaacagccacatttcagggaatcaggggctcgctggcggtttccagactgttctgtactctcacaaaaagaaacacaaaccaacttactgtggattcgagccagtcgaagatatgcttccaagagccagagaaaggcaatgaggtgatggcgggacttccagcagtgccacagctgggcgtgtgctcacttaccagcttacatactgcctgggtattgtttatggccattgcttttctatgtgaacgtatgatgagggttgatgtaaatctatgtcaaccatataatccaataaagcaggagctgtgttttattaaaaaataataaaattaaagtactttagggataagctcatggtcttgggagaaaatatattttctcagtgcctcaatttctcagtccatgaaatgggtgaccagataccatgatgttataaggtgttgtaagacagaaaaaaaaataaaaattcaaatttaactggcattcaaatcacctgagtctcttgttgaaaagtaggttctgattcagcaggtctggggggagatcagatattctgcccctctaaccagctccctggtgatgctgaggctgtattctggggaccacacggtgagtagcagggagatagaggagaacgctattcctaggcagcatagtgttttatgcttcctagggttgcctagtcagataaattgaagaaaaggaactttacagtgaaatataatccaaatgccataagggctatcaaaaggcaaagtgcattaaaatattttattagaaacaagatagaacaatgggaagacttgagtaattgtttccagtctactttcaatgtgtttcctgatgaccaacatccaactcatttctcctggctcagttcagctagtgaggactaagcagaggtgtgttattcacacctatttagatgctgtgtcctggattgtcgagcacagccctcattttaaagttctgcttcatcgctccttttagcacattctattggatcataaatccttagttctggttcagacaacatggccactatgttagtttaggctgtctcactgctctaacagctacggtttcgccttatgctggctggcgtcgagttggggctgcacactgtccttcggggcccagctctcttcttcctagtggctctgctgttccctagagtctcaagttccttgggtcctctgcatttgggtgatgttttagagaccaggcctgaaagtggcagacatcgcctcgtctcctggtgggagcccagccccatgactcccctgactgcagggcacgcagagccagacacagggccaggagggaaggaaacacagcattctctctgcccggctgcccatttagcactaggtggattattaactctctaaacaatgaagaacacactggacttgaagagtgagtgccaacagggaagggaagggacggcagcggaacgtgagctcaggacaggctctaagctgggccttgggacccatctcttgcccagggaaagggggtctttggagaactgttagctccctcagaccaaatgcattcccaccacagccgaaaggcctcccaggaactagagcagtccacgagtgaggcccgggaagaggagtacaggacagtctgcagatacagggggtctcaggtgcagctcagaccttaggaatctgaatattcccccaaggcccattccaccccatccatgcctgacaaaaacactccgcttcttgatgaggaaggaatcattacccggggcccaactggactgcccccaggggtgtgtgtagggggtggggggtgagtgtggttgtgtgtgtgttgtgtgggggagtgtggttgtgtgcggggtgtgtggttgtgtgtggggttgtgtgtggagtgtttgtgttgtgtgtggtttgtgtgtgtgtgttgtatgtgatggtgtgggtgttgtgtgtgatggtgtgtggtggtgtatgggatgtgtgtgtggttgtgtgtgaggtgtgtgtgtggttgtgtgtgggtgtgtgtggttgtgtgtgtgggtgtgcgtggttgtgtgtgtgtccgggaatggcaggagagggccgtcacagttaatgtatatgttacactcagagaagactcttaccaccaaagctcaattatttttcaaactctaaatgcagacaatgtagccatatggaaaaattggttgatgacaacaaaatggtttgttgttgttgttgttgttgttgttgtt

SEQ ID NO: 14 - DNA, 3160 bp, synthetic construct
  misc_feature 1..3160: note = Description of Artificial Sequence: Synthetic polynucleotide
  source 1..3160: mol_type = other DNA
cagcaccttgattttggatttcctaatctccagaactgagagaaataaatgtttgttgcttaagctacccagtctatggtatattgttacagcatcccaaactaagacaatatcagtaaagagaagtgtgtttacattggttaagtctttctgagtcaataccttgattgtttcattgttatcaagttacccattcttgaaaaggagatattactttgaagcgacgactagcaaaagttcctcaggaagcaaccgtgatgataaacataggagaaaacaacacacacacaaaaataaacaaacaactgtgagaaacaataagcctgagtaacagttactataaaatgtggcattcaataaaactctaggtgaaaatttgacccctttcacaagtgaaatgagcaactggaccagtgctatgaagttattgtcgatagtttaaatgtaaaaagtaaattatggttgcaagcatttttttttggatttgggagctatgaaaagttcaggttatatataaactcgctgcagagagggcataaaaacatagtactacattgatctgtccttgcactatacttactttaaagtggaaatttttaagattcaaggtcttttttcagtgttatcaagggaagtaggtaattagatacttacaaagactatttcatataataaaaataggactgtttgtcctgcacagttcaagatatcataattgtattaatgagatatatgctattattttagagatcatctttattattcaaaaggagccagtcatcctgtactgaacactcaggctaactctatagtcactatcaatttcactgttttgtgtggtctgattaatctctatgataatgtgaacttaggtaacaatatagaaaaattaccaaaaaagatgtataaaatggcccttgctctgaaggatctttaataaagatttaaaagtaatcccaatgaaactgattaagtcaattaaatgatgtttttaataaatacataaaattcttacaaaaagacataaatcttatcactggacataagaaggcttgatgttgaaagaagtgagatctgaaaagataatgaaggatgctatggtcagaaaaaagacctagactaaggcaccaagggtatacaaaaggaatgggttattgtgtgtgggaagctgtgtggatattgacttgagtgagtctatttagaaaaaatgaaattattgtctattttaccaccatgagaaaacttctagatgtattgttgccaactttgaaggggctatatcttcactttgggtgtgctgtgggaatatctcagaggtaaaccatttgaaggtcacttgagaataaagaccacttcagggagaaatccaaagattgtccatttggcagtagaaaatgagaggaaaattatctcaaagggaactgagaaagattttatcactcagacacagacaaatagctcccagagccactgacattgtagttgagtgagaggtccatatggctaccaaccatgattggaatgttcttttaaaatcaggtaaaagtaaattctagtggaagaatacttgattggcaattgggaaaaaatatcaaatgtatttagatgtcatgaaagagaaaaacaaataatgttctcaaatgtcagcttcaacttaattatgctgcagcatctaatactgatttaatgagtaaaatcctgaaatgaaaaggtaaatctaaagccatatgcctttccaattgttaagtatttatggacaaatttattaataccctggagtttttgagatggttacaaatacagaaatattcagaatccagatgtagcaggcatgtatttcaaaccaccaagctaagccatatcattaaatacttctatttattcttctatacctctatttaactgaattcttttctaaggagaagaaaacctcaccccaccaatgccagcataccgtaggttgtcaacacttatccctacttaagcttgatatccatgtctatgctgctaccctgttctccagtcattaggtacttgctatttactctgtctatcctttgcaactaaaaggtctctctggcctatcttgaatcaatatgggacaggacaagctattttcagatgatctcctgcatcgttaaggacctctgatagactgaggatgggtcctatttcaatctatatatcggactatactgttttgccaccattacaattctgctgatgctagcctgtgtgagcagtgaattctccatgagattatatctcttctgagttccataaagcaagttgagcacaaacactctctggtctctgagtcccatacctatgtgttggtttctgtttctctctacctctaaaatttcaacttcagaaattgacaggggacagagcccactttttagaaaatgataaccacagactcattcccttggcttcctgttttagtcctcttgtagaaaacagagttattcctgggatatggttatttgtcagctttctttttatctgactggggtcaagtaacttcttcaggctaaaaagtacatggaagatattttttttttcctagaccaaggcagttaagcaaatgtacaaccttaatattctccttcttacattcttggctacctgttaacacccacgattatcttaaaagagatatatttaaaaaaacaaatcttccatcagctcagtgtctgtcaatgatttcaggaggcagaactggcctttgtgccactcccagttacgaaccattaacaccttcacggtattttaatgcattcaaaaatatactttcatggttttaaatctcataaacttagcatttgtttgtcataatatctggtatgactgaaacaaacacatttgtttacagagaaaccttaagttctgttgcttttagtatttgtctcttcacatttaaaaccaagttttagaaatgtaaaaaagaaacaacttttctgtcttaacaagctggctctcatagacaaaatatagtttgtcttttacgactttttctttgctttaactctgcaaagcatattttttattattattatactttaagttttagggtacatgtgcacaatgtgcaggttagttacatatgtatacatctgccatgctggtgtgctgcacccattaactcgccatttag

SEQ ID NO: 15 - DNA, 3098 bp, synthetic construct
  misc_feature 1..3098: note = Description of Artificial Sequence: Synthetic polynucleotide
  source 1..3098: mol_type = other DNA
gcgctctgtgtgcagcaaaatcattagccaccaacataagtataataagaaccctcagaactcaactgtgaaaaaaagaaacaacccatggatagaataggcaaaggtttgtgcagacatttcatcaaataagatgtacagatgacacataggcatataaatgggctcgcaacaggattttccattcgaaaaattcaaatcaagccgacagtgagacactactatacaatttttagaaattaagaagaaatacagataataccaatgctggtgagcatatcagggtccaagactctaaaacgttgcaaacaggaatgcaaaatgaaactgctactcaggaaaataatttatagttttttctaaaatcaaacattttcttaatatatgacctaaatatcccactcctgaatatttgtgtcagagaaatacaatcttagattcacaacaaacttccatttaaatgttcaatatattgtgctcacgtgtgtgtgtgcacgatagaaacaaaaagtaacatgaatgtctcaaaatttgaataggtaaaaagtaggaagtgtctattaattgaataccatcagcaataaaaaataacaaaatgactgatacacaaaccattacaggtgaactccagacatgatgctaagtgagagaagccagtctcaatgatcaaagggacacatctgtaagcaccacagtcatcctcaggtgtcagtggtttgggctgggctctctgtctctttcctgaccagacccagatgttgagctccgccacttgcagatggaaaattctactattttcaacaatgcactgaggtttgaactgcttcacagactgaacgaaacaaacacgggctcctttgaacagtgtgcagcatttgttccaaccacaagagaatgtctcccagctctgccccttctcagttttccctgcaagccagcagccctgcagtttagcctgcatctcccatgcatgcacccatctccttccaagggccttactccacaacctccacttattttgagtgcactgactggctttgaacttttccacattctgttgttattgaagttaggatgtttagagccatattaaggatcatattttatgactgaattccagtgccccctctctcctgggacagagcacgtaaccaacattctgcatgtggagacaaagatgagcttttttcttcctcagcctaggagatgagcgctcagtggagggttggatagaagcttcccaccttctcagcactccagttctggtggggagaacctctgccataggagcagagctagaaaccagggaccgaatgttcccagtgacactggacccagggtagagcctccatccacgagtggggctccatggaagaagcgagtctctggctctcagtagcttttgtccagaactgagccttaggatcgtgtactgtgggcagagtcagagggccaatgtcctggctcctggggaacagtttcctctgaagggagctgggtagaaggtgtcctgtcttctcggctacatctgtttgcagtggagtttacatcatgctgagttgggatgtggaaggaaggaggagcatcttagatcaattatgatggctagacttactgaattttgtagattttcttgaataaatgtttcttcacttgctgtatgctgtgagagcctttccaaaccctatattttttcaaaataattttcactggtctcatgagggcatggattcattgagcccctcatgctatcaaagagaaatagaactttttttgttcactttttagagaacatccatgggttataaaacaatgggttgacttctcttccaaaactttacagataccgtcaattttcctcttgcttgtaaggttttatccagaagaatgctgtcatcattttttctgcttttttggaaggaatgccccttctactcacctcaaattgcctgcatgtatttctatttttctttggttttcagcagttttaataagatttacctaaatgtgtgtggggggagcagggagtgtcattctgctgttctgtgttctctgagatgcatggattcacggtttactctgtctccattttggggaacacaattagaaaaaatgtcagtgtgagcccagaaacaagcctccctgaagtgggcacaggaccacttgggggcgcacaggacccactgagcacaagagccaacctcagggcatgtgcagatgggggttaaggtctggtttcctgtcagccctgtggcttcctctccataaaacagtttcctttgtggcatatctctggattccttatcctgttcttcctattcttcctgaagaagaaacatttgtcgtaacaagagaaaaattttctcacatgcaccaaaggcagagtcacctacagtcaattagtcctgtttctcaatgttaataaactatcaatgtttctgaaggtacattgtacagaacccagaattgagccacacaatgtatagccaagtgatattgacaaacttaacaaaatatacaccagggaaaggacgtcccattcaataaatggtacttgggaaaatggatagaaacatgcagaagaacaaaactagatccccaccctcaacacattagtcaggtctctaaaatgcaggagtacatatctaaaatttattattttattgtgcatttttacgtgttccagaaggtgggagaaatttctttctgtgaagagcatcccaaagtcaggcactcctctagaacacgtgtttaatccttgtctttggcttattgatgagctctgttggctgcaataacttctgccatccgggctgactttgcatcatgtagaggagcaaattctgaatgaaagtttgcactactcaattgagtgcataacctacagtttcgttactgatgtatgattcatcaaagatgatatcagatcaaggatttcaatgagaatctaatctaaaagatgtaaacaaattttcctaatttagataaaattactgtgagcacactgctagtattcagccatgtctcctatcacattgaatctacactaagtttgacctaaaagctagcacttgttctcatgttccaatatgttattt

SEQ ID NO: 16 - DNA, 2967 bp, synthetic construct
  misc_feature 1..2967: note = Description of Artificial Sequence: Synthetic polynucleotide
  source 1..2967: mol_type = other DNA
tggggcctagaggcctgggatctagctgcacacagagcgcggcgctctgtgtgcagcgcaacattttatttaattatcatcatttgtctccaaaagcaaatatttgcaaactacatgaattcctcaaacactctatatctttatttgcagaaatgagaaagaaagcctcaggctgatggcttttgttcaaattatacaaatgtatgaataactataaatgactagttattattattacactataacagaaataaatgaattctctttatttaaacaactctttttctctaactaaagtcttctttgggagccatgggagatctgaatatgaagcaaactgtttttgttttaaaatattcccaaacaaccatgtaaacaaggcttttatgttgactgtgtatattattgttctaactaaaattttaagcctcttaacaggttatttattttgccgtgtaaacattttctacacattctggtgtttagagagaaaccatccctcaagcaacattatttaaagcggtttttcattagtcttattgttctggaaagcggaaactattgtatttctaagataggttcaccctctttatgtacgtaattctgaaaatatctgaaaggttacattttaaactaaggtcattatacaaataagaaaaacatttatttaagacggtttatgaagttaattattagagtttataaaaaacaatttaatgcatgtatgctatcaataataaatactgtgaaaatatttgtttaaagtgtggtcatgcaaggctcctatatgcctataagagtaagaaacatatgtaaatcaatacagttctgatcattttctaccatagcgccaggttcccttcagaaacctatgctagattgttcacattccacagggagaaacagtagatttttcatttgttggaattatgtttcttattctaaaagcagagaattcttatttccttacttcaaattatcaaactccatagttaaggagtctttattcaatatctttccatagtttattctatttcatttcctgttagctatggcagatgctgggtaacgtggaaatttaaggaacaggaattcttctctgatggcatgttttacacattgctgtaaaaattgctattgaagccgtgttataggtgcttctcctttattactgtgttgatgtcagtgaaaggatttattaaaaactaaatttttttatggaaaagacttctatcactctaagtcttcacccactatttaacaatatattattttgttttgaccccctcaattacactaacaaactctcatctctgttgaggtaaaattttgctctttaaatctttcttgctcagatatcttagggtataatttgaaacaatttaaaatttaaggggatctcagagatcttctagtttgctgttcctgttgtacagatgatgatataaaaaaatcttaaagaagtatgtgactcagttaagggtaatccactttttaaagtcaaaggaagccctggaacacagatcttgtgattccaattttatgatttctttttaactattacttgctgactactcagtatccttttcctaatcaagtaaataaagatatttgtaagttaattttctatctataattgattctgcctgagacacaggaagagctgtttgagttcaacaatcataatggaaagcaacagcgataagagtgtcccttcatcagttcctgctaatttttcatcttattgagatatccgtctgtttattcttgctgttattgccatatttggaaactgggaatatacagataaattatagagaacatctttcatcatgtctcctgaggagtgttcaaacaggttggcattttcaaaggaagctttacctagatgacagaagaagaatagcaatatcaaaaacagtcccctctatcccttccctaaagaaaaaaaaaacaaaaatactaagagaaagaagacaatataaataattaaaggcagacaacttcataaagtaccaaaattctctcatgataaatgctttctttgtgtgtgagagggatataatcttgaacaaaaccagaaatgaagactgttggacagtgagagtgtcataggcctgtataatgagaactccttccagacttctgtagcatttaatgaggagactgggttttggtagggtgagattacttgtgattttatcactacccatgcctcagtttcttttgagacagaaaaaaacctgagaagggggctctcttagatatcccagcagggtgttagataagccatgcttctggctttacaatactcactctgactgtccttccttctagcttccagattgcccaccactgtgtcttcctcccacgtagattcagtttcctgtctaaggatgggtctgctttacagctcagttgctgctttaaaaagcagaactgctcagcaattgaaaaaaagtgtttccacgtaaaagccaatccatgcaactgaagtaagtgactgtcacccaggatgtgctgatatgtcaatttaaagatgcaagaaacatgaaaaagcaaggaaacataatgccaccgaaggaaaataataattctctagtaggaaatcacaaaaaagaaaaatctataaaatatctaaaaaggaattcaaaataataatattgaagaactcagccagatacaagataacacagataaacaattgggaaattagaaaataatttataatctgaatgataaattgctagatatgataaaaaagacaaacagaaatcctgaagtgaagaattcaatcagtgatataaaaatacaatcaaaatcttcagcaatagacttcatcaagcagaataaagaatttctgacttgaagacaggtcttttgaaatgtcatagacaaaagaagaaaaaaggacttaaaaagaatgaagaaagcttatgtgacatatgggggcgctctgtgtgcagc

SEQ ID NO: 17 - DNA, 2953 bp, synthetic construct
  misc_feature 1..2953: note = Description of Artificial Sequence: Synthetic polynucleotide
  source 1..2953: mol_type = other DNA
gggggcaggtggcttgtgggcagcagtggaggggagttttggcctccatcttcagtggtgagcaagcagttcccctcaccagctgagagtgctgaagttatgtgggcagaaggcgtggctgctgcctctcccaggacagactccctcactggggctccccggccactgccctccccgagagggagatcgagaggcacgcggggcctctggctacacaagctgcttgctcctctttgcagaaccaagcagaagaatcaggccataaatgttttattctagagttttctttgggaagcaagttcatgagggtctgatttacaccccgtgtaatggagtggtggcgagtgatgaataatgcatgcccatttcactgctccttggggtgatgacagtgttttctggacttacattaaacatttaaatgaggagatgtttcttcttggggtcttcatctgttccatagtgtcaaagaaagagactcggagcccctgtacagcctgccaacgcccagaccctcttttttcccttttagtaatcccagcagggaactaatacggcctggttcccagccactgcttaggggccccattaaaatgcagcggaggaggctctagtgtctggttacaacctggcggtttagaatcggggaaccgcggccacagcactgcagccattgctgacaccaggcttccaaccgggggaggctggaatttgatgaaacacatcgccgtcacagatgacagcccaatctttactgactagcagctccagcgctgtgtgccattcacctgtgagctctgtgacagggagagagatgcaggagcaatggagcttgcctggatccagggcactgcacagtcagactgagctccagccctgacctcggtgcggagggcccctgcagctccgtgcacccagggggcagcatcagcgtgcacgctgtcactttactgtttgcttgtgctaagttccatcagacaggccatcctctcctacctgtagccctgccagccgaccttgcactactgggctcatgtgaaatgctcacaggctgtgttgttgagcatcctgcccgagggagggattgctggagttgttctgtagggtcagtgactcagagaactgggccactgcatgtcggccagctccttcggaacatgtgtgtccacttgcctaggccaaatcctggcaggtatccattatggagccttttaaaaagaccgtggtgcaaacgtactttattatagtcagagccctttcctgggcatgggctgctaggcgcgacttcgtgggagacagggctgcacttggctttgaagtcggagcagagatttccttggatgatcttggagataggatgaacatctgtctgagggctgtgtccccagttatttttactcaaaggcacctggagctctttctcttttcttgttttatcactggctgactccctcactcctgccaagtctttactaatcccttaaggcctagaatcatttaaaattaagccattaaaaatcaaagcagcatcagagaggtggctcgtggttaggaggaagccaggcctgcatccagggccaagcaccatggttggagctggaggcaaggagccctcaagtccctggtgtcacagtcagcaactctcaacctcgttatgaatacttcaggggagaggcgccattggttgggggctgaaagtacatccaggcagtgcgcagctcaggctttgcaggatgctggctgtgtggaagtctgtgcctttactcaggagttcccaattacagtcatttaaaggagaggcccctttccctgcagttagttcctgccagggttagcagtggctgctcatctctgcccctcagcaggcctcgtgttcttgggagtcacattctgtacagctgggcctgtggcccccagtagcgtgctgctgagcctgtcagtgggaggacccctgaccccctcccaccttggccaccagcaaattgctgctcgtttgcatccgtagcaacagagaccagattcagaggatggactgaccccatcagcatcgggaagccacgaccagtgtgccactcacttctttgtacttttagttttcatatccctgagggcagagcccagcccagcgttgcctcctacacagcaggatgtccctcgcacccctcgccctgggtaccacaccacacacccatgctaggaaggccggccacacgggagccacgctcagccatgtcagttttaggcattcttcatcttgacctttgggaaaaagcatttccacacatctgacctctctctgctcttcattccagctctaagtaatagcttactgttaaatcccacatatttgcttggagcttttgccatatcaagtgtcagctgaaggccaggattccagtgaagccgccagaatgtctccctcctgctgtctttagggacagcctgtgtcagggtggccaaggccccagacccctgaatgggccctgtggcagctcccactgtccacacctcaggttccttggctgagccctcccgagcctcctgacaccgagccctgtgggttgctttacgttggactcacgcagggcagtcggtggatgccggcacagatgggatggtgagccttcggccgccgtggtccacgatgcgtgtgctccgcacagtgtgcactctcagcctagccttcagcctctgcccagcagacaaaacacagtctccttggtctctcctggccaaacacattgcccccctttcattggagtatggcttgagcagctccaggacattgggaggtggagatctaagtgctggggcaggcttcaggcaggccaccctcccagtgtggccccagcgtggctctggctgtgctgtgcttgtgctatgctggtttgggacagcttggctgtttctggagcatttatctgaacaggacagcaggcatggtaacaacagc

SEQ ID NO: 18 - DNA, 2917 bp, synthetic construct
  misc_feature 1..2917: note = Description of Artificial Sequence: Synthetic polynucleotide
  source 1..2917: mol_type = other DNA
aaatctgacttcactggagaatcaactatccactatgtagatgatgaaattcatgtttgcaaaataaagtgaaatctacatccttgtatctgttgtcacatgtaattcagacagtgagttctatgaaaatcaggtctgtatgcagagataaagatcagcaagatgttctgatttacaattctgtgcaactcagctggttctaattcacttcgaaaacaaggatatgatgatttttatggttctttaactacctatttggtgaattcatttatgtatttattcatttaaaaaatatactgagtttccacaaagtgctaagtattgtgtccaaagctggagaaatagcaataataagataagtaagatgaaatatcttcatttcttactctgagcaattataacaaaatagcataagtggagtagtttataaacagccaaattttttttcccacagttctgggtactaagaagtccaagatcaagtcaccagcaaaactggtatctggtgaacacccactatatgactcagaaggaaccttctcactctgtcctcacatagttgaggggaagagctctggtttccttggcccttataaggacactaatccaatttgtgagggctccatctccgtaacctataattctattaacacaaatcagtcctaacatttagaggtcaaatggagacagcacagctgtcaaggagtggtggctgtcacagacaagtgtggttcaaaaaagccaagaaaaaggagtttttaaagaaacagggcatgagcaactggtcaactgtgttgtgtgctaagagatggaataagaagaggttagagaggtagctattgaatttggcaacatgagtgttccccgtttctgtggaattatgaagatgaaaaccttattccaaaggattgtgtgagaggtgaaaaaatgagaaagagaagccagtgaatatggacaactatttccaaaagttttgctgaattgcgtgcaaaaaagagttgagtaggagcaaaaagggtacaggtgttaatgaaatgaatttatattcccaaattttgtatagttgtacacataactagaaatatacatacatataatgcaatcagaatatgaaaagagcatgggggaaaagggagaaagtaatttaccaattaacctctacttaaaatcttctcattaaatgggaaatttaatttataagttttcatacagatttgtcccactccaaatctgtcacttaaattacagagtaagaaaactaatagtgtgtagaagaaatatgaagtcaagaaaaaatataaatattttcagccattatttgcaagtatacaaagaactggtggagctgaaagatacaggaattagttgagtggaaatacggcagagaaaaggcacactcctgtttatttatatattgtgatgggtgcaaatgagctgtgtagaagtctgagatgatgtctcatggtaaactagcaggagggaaatcatgaaagtattcagaaactaatagtggagtcaaatttcactatgataggacagacgacattaaatctcccttatattgaagtttgcctgtctaggacagtataatttattttattgtactacagaaaagtaagacactttgtagatgaatcaatctcatattcaattttggtcacagatttaaaaaattatcctttatatgtctgcttttattgaattgctcttgctagagtaaaaaaaaaatgtttctaattcagtttttgaaaattttatattcaggagacttacattattggtttttggttttttttttttcggcattttggcacatttggcataatgaattgtcaatgactccctgacccctagaaataactttggccacatgattaattgaagatcacaggcctctttatgatgcaaacaccctgaagggataaatcacgtgtcctatctctcaacctaaagcccagcacacagtattttaaaaactgttcaacaaatgagagatgtgccacggaagacctcatccaggaggtttgatgttcagagcactagtcctgagttttaatattagttatgccgttgatctgcctttcaggtctttgtgaagtcatttagtgttcttgttttaattttatccatacatttgggataacattacccataggataatacataaaaggctttgagaaaagttaaagtactaaatgtttgtacagatctagctaatcgtgtaaatgcagcctttcattccttctgtgtctgcacctaccaaatgagagaactaaactacatattgtactcttcactctctctattagaacagtctcctgttctaactacaacttttccaaattgctgaaccagagacagggttatatgaccttatttatcctttttaaaattattaatagtagtgattaccaacgcacactttttttttagtaaaataactttttatttgacatctacaagattttggcatcttgcagcttttggtttatacaatcttgatttttcaataaaaagaaagaaagaaaaggaaataaaaataccaactgctccctcacttgttttataaacatctattataggcaaaacaaaacttacccatattatatagataagtgtctattcacatttgtacattaccatttttaacagcttgagataaactctacgtcttacaacacattaaacaatattcaagttactgagtaacaacaataacaacaataacaaaagaacacacagcagaagcctcaagtgtttcctcattgtctacaactcaactacggtttcctttatatgagtgacaaagcaaattaagattatatatatatatattatatatatatatatttttttaaatcacactcttcaaaacaaaatgacatttcctcaaatctatactaatttttagttgtgg

SEQ ID NO: 19 - DNA, 2903 bp, synthetic construct
  misc_feature 1..2903: note = Description of Artificial Sequence: Synthetic polynucleotide
  source 1..2903: mol_type = other DNA
gctgcacacagagcgcagtttcaactgtttaatcatgttttggtctttctggtgaccagcccccattcagaagctatctcaggcccaccaagagtggcctcatgtaaaaaaaaaaaaagacacccctgtcacccaggaaatttcaaaggttttcagctctgtgtcaggaacagaggacaaagaccaaatttgcatttctttttatcaaagtctttatgctttaaagacaaagctacttatccttgccttctctagagtatgtttcctttgaacatttgtacaatcagcaatggctcccttaaaaccatggttgattgatatttatgaaaatttgctcttcagtcttgacagcaaatgacacccatgttcaaaaaaagtcttcccaaaagttcaatttgtacttctaatatttccattgaaacacaaagtatgcttctcagaggatacttttacagaagtaaggaaaaatataaaacattctaccaataacaacaaacagggcaggtaatattagaggaactttttataattcttcctctgccaaaatgtcagtaggagtgaccatcttcccatgacacaacttttataaaacaactgccacacaccatgtcatagaattcttcattgagtgacaattatgttactctgatgtcattatacttacactagcaccactcaactttactataagcttttaaatcaatgagaaataactgagagctaattttaattgtttgcacacagcaaacattaaagaaattactttaaatcaggaatcataccttatttctcacgtactttttcctcatatcatatttagccttagaaaagaaagatttttatgttccatatttggtccttacagttgtcaacacagtggctaaagattgacttttttccattcttgtgtatacacaatttatttccacttttctgctataaactccaaaaatggatttatgcactcaaatatttgtaatggggcacaaaaatatatagtactatgttatcagagaccttaaaaaaagacaaataggacttgagcagtatgagagagatacgcaccttagaaagatatgtaaattagagctatggctctcctcttaaatatatacaaaataatttgtgtaccacagaaaaatagtggaccttcgttacttacctaaaaaaaatatattgcttgtctgaagaggaggatgaaatgaaatgtgtgttgtttgatccatgaagctcagttcctttgagaccacacctaatcaagtaaaaatgttgggcaattcataaaatagaattaacaatttttatggaatttgtctgcaaaatactatgtttcattatatgttagttatgttcttcagtgttttttttccaattcatcttacttaaagcatcgttcccaaatttctgacttctaattgaaaaaattccaatactatgtttttcctatagaatgacttctcagagaaattatctcctttctccttctaccatactcttttgagactaaaacattacagcgcccttcaaaatattatatttagattgaatgaatagtaatctcatttttccatagctttggtttatcatatgtatgagtaacagttgatcagtttggaagccaatggcagatttttcaattttgtaatgacacatttaatatacaacatacgtttatgtgtatctgctacatcttaagtaatgtgtttggttatgctgaaaacaaaaaggtaacattaaccaaaaatgctctaaactaaaaattttgaacaattggcttttttaaattaataaaattaataaagtggtaaattgagtggaattgcctcaataatcaatacagagtttattaaagataaacaaagttatataattccatcaggaacttggagagtttttatttgcagaagtcaaggaaagaaagtgtttcatgaaggaagaacattatttttaactatttttagatgcttttcttaagggaagcgttcataaggagttataaacgtgtgaacaatttagcaattaatatactactttaaaattatttttatatgctcttattgggaagaaaatctttcctgtatttacaattatcaaatgttgcatatttctaaacaaatgaggatattactgggttttttttttctggccatatgaataattttggcactgtgtattcacataagttgaagcacctacttttgcccatattatcagataatttttgtgaggacaaagatttaaaaataccaagaagaggttaaaatcagcacaatattattgtccttactgttagaactcttctgtacatactattatgtgctaacataccagtcagagaaatagccttgtgcacagaaagttcatgttctaagtattacagtatagaattaatcagtcagcggatcgatcataagaagaataaacctgcaagaagctatacagtacttccatcctaaatctacttttccttttaaagcaactgaacttggcctccagtcaccaagaaaagaactaaatttatttctatacaataaaaagatgaaaatactgtctacaaaataaaagatatgttcacaaaacagggtatgctgcactgtatttgaatttatatctaataaactatcaggaagtttcttttaaaaattacactataatagaggaaggaaatagtgcatcctaatcatcaaggtaaatttaactttcacagtatatgaataaagaattatttcataaaacagtaagtgtgcagatgaaactcagtaaatatttaaaatcactactaatattcacactaaaagttgtattgtggcttacacaatcttcagaagaatgtttataaatcaatgtaaaataaaataaagaacaaacagcaaaatacagagtataacaactacatatttatt

SEQ ID NO: 20 - DNA, 2887 bp, synthetic construct
  misc_feature 1..2887: note = Description of Artificial Sequence: Synthetic polynucleotide
  source 1..2887: mol_type = other DNA
gccactacactccagcctgggcgacagagcgagactccatctcaaaaaagaaaagaaaagaaaattataacagaatatttaatatgatatctctcccccgccccaatccatctgaataaaaactaagtaaatgttagagcagctgtattcaatatgcaaaattatgattattcctgctccaaggcaagtaaaaagcaacacaatattttccattttaaaaaaatgtatttcatttcagaatattcttcctacagattattttttaaatgcctttatttagtcattttcttgttctcagtttttcgctcaaaaattctgtcatttctctgatgtgttcattttagctgcaaacacctaatcagaattttaaggagaattagtaggttggctaactttcagaaagaaatactagtggtgttttcaacaggccggcaggatgtctccaattataaagacggaggaaataaaaacaacaggatggtaaaatccattgagggacagattgcattttataggaagagatgtaacttcatttaccttcagtctttatgtcttgcaaatgtgctcagcactcctacatcccatgggtctcagcgtcaatatttatgtgctggaatacttcattgcctcataaaccaggaggtaactgagtattttcactctctgggaaaaaaaaaaatgggttatactaggtagtttccaacagctccacttctcactcatacttctatgcattgacttgcaagaagacacaaagctagataaatgagaagcgttgatctttttcttcttgctccttgaattagatgttaaccatttctaatttcttgttaaacgttattcagctccaaccaaaatttcaatcatggataacctaggggtaaaggcttgaagcttttttaaattttgttttaatgtaaatttcaaaagtctttatgggggcatgtcctagtaccttaaacagcaaattcagattcaaagttgatgtccttccaaaaagaaacacagaggacttctaaataaatgatccctaaaagacttttaaaaatatcgacaaacattgcattcgatatccagaaacagtgagtatttctcaatggagaatcactcacctcatgaagagtcctcatgtggagtcccagattacaagcctcctttctcaattccacagagggttctcagtctttaagtatcatacatccaagttacctggatgcttaccctctggtttctgctccaaagcccttcattccatcaatatttttcatctgtattaaatttgagagcagaatccaggctcctgacagggatgagctcatacatctaataggtggtcatgtcatctaccagccaaaccagtctcccaataaataagctgttttccatactgtgttctacagacttgtattctatgggatgttttctctccctctgtctccctatctgtctccccacttccttcttttctctcttcctctcttttatacaaacacacacacatacacaaaggagtttgtaatgaaataagcttgaaagatgtagacttaaagtagctctatttgttagatgatatctcaaagcatatatgttaatatgcattatgaatctccaaaaaagtgatacaggaggtagtgttttccaaatatacttgagcacggatcatttttttcaaggaatgttctttattgtcacaacaattatttcttgagctactactatatgtcctctgttgattttcctaagtgcatacgaagataaataagacagatttcctgccctaaagaagcttataattcaatgaacataccacattctccacaactgtgctctctagaaaggtagccaccacccacatgtggctattttagtaaacaaataacattaaaaactctcagttcttttgtcccactagtcacattgcaagttcttaatgaccacatactggctactgctgccatactggatggtgcagttatacaacatttccttatttccattgcagatattctattggacagaggtgctctaagcactaccttatttgtattaatcatacactaataagcacgacatttcactttttatatattttttccttgaaagactacaaactttttcagatctcatacaatcacagtcatcttcttattgcagttttaaaaattcactcagattgctagaaattatttctagttctgttaatttattcttgcagtgggttgttttggacgtaatctgttacctaatttcaagggcattgacatgagtttacaatcagaccaactctatggttggtctaatctgatctgattttacagatcctaaaatcagagatttcagagtctgcaaaagcacctagatgttatttaatcctattctcccaattttgtaaagtagcaattaaagctcagagtcattaggaactcacgctggtttacaaagatgttaagtagcagggccccttggattcatctaagtaaaatttagtggctgtatacaactccctgagccttatatattgtcctcagaaggaataaactgtggcatagcacactgctggctaacaagtacacctgtacaaagacaggatttttctgttgatattcctatgctaatgatgtaaaatggagctcatctccatgagattattatcataggcattaacttttactgaaactctgtgggtatcataaatgataagccttatagagaaatatttgctcaattacaaagtgtgtgtgcatagggtgtttacacgtgtgcacttgtatgcatatgtgtgcagaatcaggagaaaggatgtgttttttttaacttttaagttcaggggtacatatgcagatttgttacagaggtaaacttgtgtcatgggaatttgttgtacaga

SEQ ID NO: 21 - DNA, 2873 bp, synthetic construct
  misc_feature 1..2873: note = Description of Artificial Sequence: Synthetic polynucleotide
  source 1..2873: mol_type = other DNA
gtcccctggcagtaccacagccttatcctttggtcaagaatctacaaccttccacagcaacccaggctccactcacacaacactcttccctgacagcaccacaagctcaggcatcgttgaagcatctacacgcgtccacagcagcactggctcaccacgcacaacactgtcccctgccagctccacaagccctggacttcagggagaatctactgccttccagacccacccagcctcaactcacacgacgccttcacctcctagcaccgcaacagcccctgttgaagaatctacaacctaccaccgcagcccaggctcgactccaacaacacacttccctgccagctccacaacttcgggccacagtgagaaatcaacaatattccacagcagcccagatgcaagtggaacaacaccctcatctgcccactccacaacctcaggtcgtggagaatctacaacctcacgcatcagtccaggctcaactgaaataacaacgttacctggcagtaccacaacaccaggcctcagtgaggcatctaccaccttctacagcagccccagatcaccaaccacaacactctcacctgccagtatgacaagcctaggcgtcggtgaagaatccaccacctcccgtagccaaccaggttctactcactcaacagtgtcacctgccagcaccaccacgccaggcctcagtgaggaatctaccaccgtctacagcagcagcccaggctcaactgaaaccacagtgttccctcgcagcaccacaacctcagttcgtggtgaagagcctacaaccttccacagccggccagcctcaactcacacaacactgttcactgaggacagcaccacctcgggcctcactgaagaatctacagccttccccggcagcccagcctccacccaaacagggttacctgccacactcacaaccgcagacctcggtgaggaatcaactacctttcccagcagctcaggctcaactggaacaacactctcacctgcccgctccaccacctctggcctcgttggagaatccacaccctcacgcctcagtccaagctcaaccgaaacaacaactttacccggcagtcccacaacaccaagcctcagtgagaaatcaaccaccttctacactagccccagatcaccagatgcaacactctcacctgcaaccacaacaagctcaggcgtcagtgaagaatccagcacatcccacagtcaaccaggctcaacgcacacaacagcgttccctgacagcaccaccacctcaggcctcagtcaggaacctacagcttcccacagcagccaaggctcaacagaggcaacactgtcccctggcagtaccacagcctcatcccttggtcaacaatctacaaccttccacagcagcccaggcgacactgaaaccacactcttacctgacgacaccataacctcaggcctcgtggaggcatctacacccacccacagcagcactggctcgctacacacaacactgacccctgccagctccacaagcgctggccttcaggaagaatctaccactttccagagctggccaagctcaagtgacacaacaccttcacctcccggcaccacagcagcccctgttgaagtatccacaacctcccacagccgcccgagctcaactccaacaacacacttttctgccagttccacaaccttgggccgtagtgaggaatcaacaacagtccacagcagcccaggtgcaactggaacagcactcttccctacccgctctgcaacctcagtacttgttggagaacctacaatgtcacccatcagttcaggctcaacggaaacaacagcgttacctggcagtaccacaacagcaggcctgagtgagaaatctaccaccttctacagtagccccagatcaccagacagaacactctcacctgcccgcacgacaagctcaggcgtcagtgaagaatccaccacctcccacagccgaccaggctcaacgcacacaacagcattccctgacagcaccaccacgccaggcctcagtcggcattctacaacttcccacagcagcccaggctcaacggatacaacactgttacctgccagcaccaccacctcaggccccagtcaggaatcaacaacttcccacagcagcccaggttcaactgacacagcactgtcccctggcagtaccacagccttatcctttggtcaagaatctacaaccttccacagcaacccaggctccactcacacaacactcttccctgacagcaccacaagctcaggcatcgttgaagcatctacacgcgtccacagcagcactggctcaccacgcacaacactgtcccctgccagctccacaagccctggacttcagggagaatctactgccttccagacccacccagcctcaactcacacgacgccttcacctcctagcaccgcaacagcccctgttgaagaatctacaacctaccaccgcagcccaggctcgactccaacaacacacttccctgccagctccacaacttcgggccacagtgagaaatcaacaatattccacagcagcccagatgcaagtggaacaacaccctcatctgcccactccacaacctcaggtcgtggagaatctacaacctcacgcatcagtccaggctcaactgaaataacaacgttacctggcagtaccacaacaccaggcctcagtgaggcatctaccaccttctacagcagccccagatcaccaaccacaacactctcacctgccagtatgacaagcctaggcgtcggtgaagaatccaccacctcccgtagccaaccaggttctactcactcaacagtgtcacctgccagcaccaccacgccaggcctca

SEQ ID NO: 22 - DNA, 2867 bp, synthetic construct
  misc_feature 1..2867: note = Description of Artificial Sequence: Synthetic polynucleotide
  source 1..2867: mol_type = other DNA
gtttcagacagtgtctgatgttggaaagatgaatctaggaaaatggtgttgtaggatgccttcaattaaaaaacaaatgaacaagaccagggtcagtcagcactggagatctgtaaggaggggcaagctccctcttgcagaaactggagccaggtggggttcaggactgtgtaacaaaccttgtactaaggatgtttggcagagtaacagggaataatttggggttctcatactaagtcctttgtttcaggggtactggaatggtaatgggaaatctgaggagcagctcagtcaggaagggcccagggaatactgcatgtctgggtgatgggcacaccccgagaattcagcagtgcagagcctcccatggcttcataggagccttgctaggagtggatcactggatcccaggattggaaactttcttaacccctgtgattattcctctagtcccacgagcctttttcctcacagttatgccctcctggagtttccagagtaacctacaaaatacaaagaaaaagccatttcattgtaactggtaactttatgttattatcaggatgtcaagggcctccaggggagagaggagtataaagttttaagctttggacccaggtttatagagatcacagaagtctcttctccccaggaggaaccctctcctctattaggaggggagacttctgatgttaaaacttatgacagccaaggcaagtagtgcctccagactcctactgccccaggctttttacagtcaagaccttcatcaggcttctgaatatccaaattgcctaccttttacataccagaggggaacagggaggattaccaggatgtcttaacagagttatctgtatgaacagaaagaatagagcatttatttgcagatttatagagcaatgaaataattctgctttataactaccaaatcccaggccatgggaaggatgtggataagatttcagaatggtttcaaaatcactttatgatttaaatggttcctactctgtggtttctacttctctgatgtacttttcagccctcacatccaaggtgccgatacaccatgaacaacttgcactattttgcagacagtgggatgacagagagaggagtccaaggtgacatttgggctcatattctttaagctcaattttttacctggaaaatgagtataataagatgctgctttctgtagggttgttagtgaaacaatgcatgtaaactgctatgtagtaagcatctaataaacaggagttgttattatcacattcacatctcccatactagagtatccacgccacaggaggacaagagatgaccttattcacctccagatgatcacatagtctgtagcacataacaattggttggtgattgctcaatgaataaggaaatggactgaactactcttttcaatgctatcaaaagtttttaaatcctagtaataatataattgttttaacttgtatgtgcaccagtcacctgacatgccagttaaaatgcagaatcctgggtcccatccctagagattttgattcagtaggtctgaagtagagctcagcaatatgaatgcaagagaagttcctcagatatttctgatagaggagggtcttggtctaaactttgagaaatacttttaggttcactggtttacaagttgaattgtgcatgggaaaagtgatttctgtatatcagttggggttcagggaggacaaaagagccacagtaagtattgtgggaataagggattgaccatagaaatttgaacttacgcaacatggttgggaagaactggggaagggaaagtctggaaaggacagtaggagagccaaacagtcactaaacatgattaataggagacctggtacaggtgggtaggtcacagtgtgcaggaaacccccatatcctgtgtgtgtgtctgactgctggtgtggaactgcaaagaaggttgacagagaagtctggagagcctgtgcccctgaagtttgccttggggctgcttttgtttagtggggccacttttgtttggtggggccagcgttagaaagaagagatggaaactggaccccagtagctgcattcgtatctgtctgtcaccacgtctgcccactgtgactttctgagaataatgacttcttcatttcttctgcaagttcctcttttgggtaactccaactcagatccacataggacagaagcttctggaccatgtaatttccagctttcatcaagtggacatagcacactctgacacatcttaatgcactaaaaattacacgtttgacaccctctccatcctgctgcttttggtctctgagtgctgggtgttcactcttcttgagtttttgtgtatttcaagagcacttttgagagaattccaatgtttttatgagtaagaagtttgtaactttttgcaaacccaagtttatttggcatgttgggaaaacacgcacagtgagctgcatccttgagccagcctgtcatcagtaaataaaagacaatagatatatatgtgacatgagtggaataagtttagaatcatattattagggaaattggcattttagtattcagcctattacaaacagagagatacaggcatatccttaagatgggcatccctgggcagcttcaaagatgatctttgtgaatgaacagctctggagatggtgggatcctgtctgccaagtaaaagtggaagatgactgtagtaggttgactaatggcctgtgtattaattcattttcatactgttatgaagaaataccagagactgtattttataagtaaaaagaggttttaatggactcacagttccacatgtctggggaggcctcacaatcatggtggaaggcaaagta

SEQ ID NO: 23 - DNA, 2863 bp, synthetic construct
  misc_feature 1..2863: note = Description of Artificial Sequence: Synthetic polynucleotide
  source 1..2863: mol_type = other DNA
agccacaagtgtggatacaaaaagctgtcaactggccctttcccttgctggcagagggcagctgctcatgtgaaaaggcagagggcccactgacctgttagtacttaagccatccacagatggcagagctaaatgagcactgtaacactccctctggggcttcagaggtcgggggcaccccacccagaggctgctgcagggcctacatggagtttgctcttgctagcacccaaaagcactcgctctgacccctgcacgcacccactcacctgtgcgctccgtcctgtgaagggtggagtgcagtgcatccgagtgagtggagtctgctcctgctggcaccaaagtgtctggctggttccagcattcatgtactccagtttccgcctcgtttgctcacacactccctccggcaaaaagctgaaagctgtgggctgggtaaatgaggcacccccttgcgagtcctgcgaaggagtcatggaaatatcctgcttcactatgatgaaggattctaagaatccaacacattttagaaatgtgtattctataacataacggtggaataaagctgcaggaagacagagagtgcatgttagaaactctccttggtgttttcttttggtttctttttgagcttcataaaaactctgtgtggcaacaaaggtggtgcttcagtggtggtctctgagcacaacgtcttctttgtttatttctctacatctgagtgtcttgcagttaagtttcagctatgccttttaccttgtgaccttgtgacttcaattcaatgttctcaaattaaagggataatacctttctcaagtcggttttgaaatcaaaaggaaattgaaactttcaacttgctatgtaacaagtgtccattattattacttacagtattcttatctagatagataaaggaactaaggtccaaagaagatgagagacccacctgttttcttacttaccagcatcacttgccttggaaaagtgactttgtttgttttgactctgaaatgtgaaataatcctgcctaacccatagcagtggatgaattacatcactggagttgcgtgcaatggataggaactgcctggccacataacaattgttcaattcaccttagcagttattgccaggcaagggcatcttagcatcagattctgattccaaatctggttctcttctgctaacctcttacctcactttggaagtgaatgggaataggtaacatattaatttgtgaagtgtcctacactggtaaacattgaaggtaggttagtggcgtctttgctgttatcacatttgtttggaccctactctatgcatatacatttttttatcttgtagaattcattttagaatcaaaattttttatttaaataagacactttcataagaataaagcactttaaaggcagcttttgtcctcttcagaacctttgacagtctctggtttagttggctctaagtatcacttctgctgctacggagatgtcttcacatctcctagcaggatttctcagcaaatatcctaacagttattctccagtggttttaataccttaactaacagataggagtcaagttaaagtaatccagtatcagaagaagaaaaaaaaattttgcctgtacctggcaaattgtgagaagcataactgttaatgagtcctaatatttattatggttttgcctcttatcaaagttccctaaacattcaatgagttcttgttatccatatgtaaattttactttaaaaaatcccacaattaggggtcacttaaggttccaagttttccctctcacacacattttgctggtcatctagatattaagtacaaaccaaacaaagttgactttgctcaggccacattaaatgaacagggaagcagggagattcgtgtgatagacaccagagaggagcactctgttcaggcaacttggcaaaataattttggctgcaattgccctgtgagttgcggatgttttcggtagttttctttaacaccaccggaagacagtctttatctggaaacaataatggcaaaccaggcctcaggtgctaacacctgcctggaaagtaatagaatgaactggacataatctatttcagttattttctacttaaacaatgtacaactaaaatgcaatgtgactctaatattaactccggccccacttctttgggggattgtgggaattctgagcctggcgtacctgagggaaattccactataataatcatatttgggtcttcactttaaaactgactcctcagtgacttttaagaccaccgtgattgaagcctcaatcaccaggcttttttttttttaatgtttcccatcgaacatgtccctttacttccatatacttccaagattctgcctcccaaaggccctgacccatcttcagactgctttcttgttctctgcctgccccctcaatcttactgaggaagtttgcaggccagttggccagcttgaggcctggatgcagccttcacaccttggtggtatgttcaatatgtgtctcactcctctctgtgatctcttctctgaaagcacacagggctaggcctcctgccggcattgtcttccaccctgacagtctgcagaggcccctgccattccgcgttccacactgatccatgtcaggtttccccctcatgcagaggattctcagtctgactgcagatgcccaaaattcagatgaacaataaataacgctactagataaaatcaggatgccccgtcaaatttgaatttcagatttaaaatattttctaaattcttcacagtttaactaaaaaattattagacatttactcaaatatcaaatttacctgtatttttacttgctgattgtggca

SEQ ID NO: 24 - DNA, 2853 bp, synthetic construct
  misc_feature 1..2853: note = Description of Artificial Sequence: Synthetic polynucleotide
  source 1..2853: mol_type = other DNA
gctgcacacagagcgcagaataaaggattttacatcatggtgcctgattaattttacaggtaactcttgcctaaagatcaatatagacacttgcaaacaagactagacaatctgtaagagagtcatatttgactgcagtattgtcaccataggaagagtaatagtgcttttggtctatattacagtcagagttgaaaggaccttaacaatgatcaagggtaaccccttcccctcatttttcagatggcaaaactgagagatttcaagagtttaaaatctttatttaaagcccaacagcttgctagtagcagagctgggataggaattcagatcccctgcctagaccttcaacttcatctcgtcccatctctctctcaccgccccagacacccttgtcctcattcagttctcctgaccagccaggcttggtcccacctcaggcttgggcacttgtttcctctacctggccccctctctactcctacggcttctcctggcaagtattacctcaattatgatcctttatagaggttctttctaaaatccagcaatcactgtctatcatatcactctgtttaattttcttctcaacatttatggatatctgaaattatcatctttattaactattatttctctattattttcatgccattcacaggtaaccttcaggatagctggggctttacctgtcttgttctctgctgtattttctgcttctagaatgatgtctggtacagtgtaggtgctccgtgaatactgttaaatgtataaaggaagaaaaagagagcttttaagagttgctctgtttatctgtatcttctgattatcctgtacttccatcgtaatgtagcacattaatactaactactatttattgaggatgtgctatattttcaaatgttatgttaggccttttacaaatcttacctcattgtcttcacaacaaccctaggtggaaggcataattacccctgttttactgatgcaaaagttgaggctgagagaatttgagtggctcaagcatctggcaaagccacatccagatccgtacttttccagcttgaaagtaatcatggctaagatttgcaacctcctgtgtttattatatctgttcccaggtgttcagtatcagggcaatatcagtaaaaacaattatagaacacttatcagattgtaagcgctcagaatgggtttaatttcacattaataatgaagcagtcagttggaagtacaaagatgctcataattgcattgatctgtgaatgttcaagagagcttggcatcctcacctgtttagggtttgatttattggttgtctctgctagggctcatgacaggagaggggacctagagtgttctgtgaaaagaaagctgttggctgtgggctgagagctcaggaggggccaatgtcaagtttggggttcagcctgcccttgtgcaggaggcctccacctgaaggagatggggttggggtttcttcattcaggcagtgaatcaggatcttaagaagaattgtaaacaggacccatagccctcatcttgttctctgtgctgatatgaatgactaactgccctcggctccccagtctgtaaatgtggagtgctatgtaaatgctgactgacaaccatgttggaaaatggtttcgtgtcatttggggctggcagccttttgtggcaggctattttcaaggctactgtaactttctgccttgattcttacatcttcactattatgggagaagggaggtgggacaccagaagaaggtcaaacagctgttcactacaagtctgaggatatttctagtctacccagagagcaccagacagagaaggttcaggagtggggtcactggtctagtcggatgattctaatcctggccctggtcacaggcattaggcacaggcctaatgtcctccatggacattgtcttctgcctcctgtcccaatgcctcagtcctttcaaatgcgttcctgccacccttcctgctagcctatcccctggagttctatcacaagagcccactttcatgactggagcttgcactttgtagactgctggggcatccctaagcagtgggttgcatgtgaaaaaaataaaactggatttgaaaataagttaatggcaaaaggaaagactactacttggacattagatgtaaagtggaaggggtgaaatgtttttctttagcaggctacctggcagcttcaggatagcaatatgggagaagaaagtagaccatgaggttttaatgagatgttgtggcttttatgagggaaaacagaaaaggcctgggaggaaagcaggatatgctcactgaggctgggggttcacctaagaggagtgtgtaggattggaaaagacagggggctggtttagggaatttcagctgccagaatcctggggtgccaggagagagcaggtgtctttcaaagtcaagggacagtcatggagctcagatgggaaaggactcagctgttttaacgtagatttccagtgatcagggctgggaaggattggcagattttaaggctggtaagcagagcacctgcaccttgaatgacaaatcagtcatgtggctcaaagaagcagcacaaacaaagcaagctgttcctagggctggctgagccattaccaaggtcagaggaagccttaactgggagcatggcacactgagctctgatgtggcaaacgacggaagtcacggtgaagtggtgtccaggctagggcgtgccatgtacacacaggcgtgggggatagggaaaaaagcagaggttcctaaatccagatgcctacaggaaagaaagggagtctacataagcctccagaggagcttgaacaataaatcaga

SEQ ID NO: 25 - DNA, 2764 bp, synthetic construct
  misc_feature 1..2764: note = Description of Artificial Sequence: Synthetic polynucleotide
  source 1..2764: mol_type = other DNA
ggagaaaccttgtctctactgataatacaaaaattagccaggtgaggtggcaggcacctataatcccagctattcgggaggctgaggaaggagaattgcttgaacccctgaggtggaggttgcagtgagccaatattgcaccactgcattccagacttggcaacagagcgacactccacctcaacaaaaagaaagaaagagcgagattacgtctcaaaaaaggaaggaaggaaggacaatctcaaatgctatttcattatttttcttccccactcgtagtccagcctaaggtgaacgtttccccctccaagaaggggcccctgcagcaccacaacctgcttgtctgccacgtgacagatttctacccaggcagcattcaagtccgatggttcctgaatggacaggaggaaacagctggggtcgtgtccaccaacctgatccgtaatggagactggaccttccagatcctggtgatgctggaaatgaccccccagcagggagacgtctacatctgccaagtggagcacaccagcctggacagtcctgtcaccgtggagtggagtgagtctctgatgaccatctagaccccacctctgaagagcaggggactctctggctctggggtccactcatcttatcttctgcatctataccctggggccatgtccaaaccccatctttcttctataccagctcctgagcatagtttgaagccagggcaatggagacttcctgaccttggcttaggggttcctgaagattcatagttctcccccttgtcagagaatctagggacactggctgatctcgaaaccctcacacacaggaactgacctcacacataggaacagttctcttctttcagcattttagcctcttctcaggcattttgagaggcaacttctagaatcagcatttgccaccttgttgaggtcacacccctgttccggacatgagggtggctctttctgaatttcctcttagcaagctttttcccctgcactgtcttcatcccgatattctgcatcacgctccagaatctcagacaggacatgagtagggatgcagctggtggaggtgacactaaacctgggtctgtccttcccagaggcacagtctgattctgcccagagtaagacattgacgggagctgggggcttcgtgctggggctcatcatctgtggagtgggcatcttcatgcacaggaggagcaagaaaggtgagaaagcctgcaaggtgagcgggacttaccttcccctggcatattcacacttactccatgatgagggttcagacagaaaagaaatgtcagaaagctctagagaccactgaaatcagatagtcggggaacaaacatgacctatggcgagagggggatcccaggctgggatcttaatgcagccagatgcatgaggtcccaggtgctcagactcctgcggggcatccattgagtggtggtcaatggaatttggtgggatggaaatgtttctctaactatctgaggtggtttcaatggctgaatacataacctttcctctttcatttcagttcaacgaggatctgcataaacaggtaatattcctgctttgatttccttggggggtgggttacaggaggatatgactcttttctgtgcattgtaatactgaggctcctccaggaagggaatctcaggcatgaacccctctttcaacctcggctctcgggtgagtggggaaaaagcattgcacggctccattgctgaaggaagcagagatcagttctgttctttatcagcctaagatgcagcctctcaccataatttttctctcctggacttaaaggaaggaggccagcaacctgggataacttgtcctttacccccacagggttcctgacctcaccgaaaagactaatgtgccttagaacaagcatttgctgtgttttgttagcacctggttccaggacagaccctcagcttcccaagaggatactgctgccaagaagttgctctgaagtcagtttctatcgttctgttctttgattcaaagcactgtttctctcactgggcctccaaccatgttcccttcttcttagcaccacaaataatcaaaacccaacataagtgtttgctttcctttaaaaatatgcatcaaatcgtctctcattacttttctctgagggttttagtaaacagtaggagttaataaagaagttcattttggtttacacgtaggaaagaagagaagcatgaaagtggagatatgttaactattgtataatgtggcctgttatacatgacactcttctgaattgactgtatttcagtgagctgcccccaaatcaagtttagtgccctcatccatttatgtctcagaccgctattcttaactattcaatggtgagcagactgcaaatctgcctgataggacccatattcccacagcactaattcaacatatatcttactgagagcatgttttatcattaccattaagaagttaaatgaacatcagaatttaaaatcataaatataatctaatacactttaaccattttctttgtgtgccatcacaaatactacttaaccaaatacggcttggacttttgaatgcatccagtagacgtcatttgtcgtctaagtctgcattcgtccaccagcctaggcctcctgtcttaattttcatacagacagagatgactccccactggggaaagagcaaagcaatacgtgtagcactctttttcaaacactggtctttttttttttttaacaatccaacat

SEQ ID NO: 26 - DNA, 2755 bp, synthetic construct
  misc_feature 1..2755: note = Description of Artificial Sequence: Synthetic polynucleotide
  source 1..2755: mol_type = other DNA
cgtttcatctctttctcacatggctgttggtgtttgggagtagtttcaagttgtttgagaacgtgcttgcatcaacaaaattggcaatttgtttctgctcacagtgtaaagacaaagaataggaaattccagtgaggttaaggggagatctacctggcagactggttctcctggcctgtgacactgttatccaaagaatacttaattaggcaacacattcatactgacaggtgccacaatcctaaatgcgtagtccaagtggctaggctttagtgtcattttgtgtgcctcaaaaccttcacagctgagggaaatggaacttttctcattatttgtgacccaatttggcaatatcagttaagcaatcatgcctctgaatggcatggagtggggtaagcttctcccccagggggatttaggaactggaataattgattgtgctctgagtagctgtgcgctcagagattgttgagatgctaattaatgcacacatctgcaaccatcagttcagttttattcaacaaatacttgttttgtttaccctctgtgccagacaccatgttatgggctgaaaacccaaagctgaataaaatatagccttattcctcttctatgcagattttgttggagggggaagaattgttactagataattctaatgcagtgtggtaagttcagtaatagaaatgtattaaggtggcccacgacaagcgatacctgacccagtcaccaggaaataggggaagagatcatgaagggattcctggaggagaggccactggaaccaagtgtttaaaaaggcagtagggcttagaggaacagtgatgacaaagtctgggaagcctgaaagagcatgtagtgtgtggaacatcaagcagtttgaatttccagtggctaaagtggaagataaagagtgggggtgggtgtagagaagtaggcagagacagatcatggagatgcttgcatgccaccctaaagaggtagaacttgttcccacaggcagaggtggggtgacagagctttaaaagccatgaagtgagtgactagtctggtttaatttgggtttaaaagcctgggtagggttgatttgagaagggcgaggctggaggtggaggacaagagactttgcagtagtcccagagagaactgatgagagcctggggaagcgcagcaggcaggacaaaaaggggatgttgggtggacacaggaaattttccagagttgaagctcagggcaggggtctggctggggatggagatgtgtgcatcattaccatgtgggctgtagttaaggccaattagacaggattagtgtgctcacgtgaaacgtatgaagtaagaagaacaagaagctatgctgagtcagctggggataccacctctttgagaggataggggaagaaaatgccagcgaaggagactgcggggagaggaaagaggagactcagcaaagcgtggtgtgacacagccaggtgagcagagagttgaggacattttgacaatgatgttgaatcttcccatctggtaccacactgtgaaagctaagattaattaattcaacaaatatttacggagtaccaaagatgtatcacatatgtgctagttgacagtacctttaacttataattttaccaagattgacttccacataactagcaaaatgtaagctaccaaatatatttgttggattccattctgtcaagtatttctctgctcaacattgtttttagtttatttctacttctaattgtaagatatttttaaactgtacagtgaggcaaaaacttccatctgagcatggcattcagaagggtagtagcagagatgttgttgcctgctggtgaaataaatgcagtagaatgagaaaaacatttgttcattccattcctcaaaataagcaggctggatcgtatgggagactgagtgcttctcactgtttaacagaaaagattactctctgttcttcagctggaggaagtttatctctctctgtgcttctagttcccataatgtgaaaatgtttcacattctttcaacattgccatgcacaaacacacattagcactggctaagtatatgatatgggacactggaacctagttcacttaggtcaatctcctggtcagatgagtgaaatttgcttcttttaatcatctcctaatatggcaggaaaggtcccccaggctacatataagtagttacaaatgttatatgatttaaatagatattctaggttgtctttatctcttgttgtgcacaagccacaccctaaagtaaaagaaacagcacagatctgttgataatgagaccagtcattctttggtcaacagacatttgctgagcaacttgttaggcccatattgggagctggggtaacaaagatggattggttctactcacagccttcgaattattcatagactagtaaggtatttcatatatgttgaagttcttggtgaaagcccaagttatttctctttaccacctgtccctttggagtccttacattctaacgtgcagacaaaagtaagaagaaaagatggcttttgtgaaaagcacagcatctgttgtaggcagctgttgatctctgccatggcagtctcatttcagtaacttatcttcagctcccctctgacttccatttctcgcacagtttctggctctattttctgggttggaggggtgccctggaccattaggcatgagacattctctgctcctgccttgtcctcacagaagccttcactgggagaagt

SEQ ID NO: 27 - DNA, 2721 bp, synthetic construct
  misc_feature 1..2721: note = Description of Artificial Sequence: Synthetic polynucleotide
  source 1..2721: mol_type = other DNA
tattgtcttagtttgggatgctgtaacaatataccatagactgggtagcttaagcaacaaacatttatttctcacagttctggagattaggaaatccaaaatcaaggtgctggaagatccagtgtctggctagggctttcttcctggtttatgattgtctgtcttctcaggataacatcacaatgcagagagagaaagagatctattctctttctctttttttaaggatgctatttctatcatggagtctttgccccgatagcctcatctagccctaattacctgccaaaggagacacctaatactatcccatttggggttcgggtatcaacatatgaatattgggtgggcagaaatatggattctataacagagatgtacagtcttcaaaaatgattagaatcaagatagagttagaaataatttggttacaaatgtcagaaactcataacaaacttcataggtaaaaggagaatttactggttcactaactgtaggaaggaaagaactaaacttcaggtacactggaaccaaagaatttgaggcaaactaggctcaatcttcaattcttagctctacttccctctatatgttgccattattctttctgaccagcttcattacaagagaatggttgaggttaactttggcaccaagttaaataactataaataattaaattaaataatgtaatttaaataattaaaaagttaaataattagctttccatggatagaatactccttgctgatcaatgatgactgcagtgatagctacagtacgttaacagcagcacccatcagaaacatgattcaagttggaatgtgggtaaggaagctgatatttgacatagcagatgatagatggtcaccgttgggacttataaatactttaaatcagtattaaaaggacatttatatattgacactactgatgaaataatagttttatatttttgtttagtattccacaaatgtatcactactatataaaatatggtcccttttatataattacttaattcaaggaaccaagaaggaaaaagattatttcaaatctatataatgtaatggtcccatttcttacattttcagtcttcatactgtgaagtcactaaccgtaactgttgtagtttattttccacaatcacttaggtttcttgtttatcaaaaataaaactatcaaactatcaagctcagtaaataatttatatcatttgacagaataataatcttaagtaaaagtggccttaatatagatagatatttaggagaccaataaaaacactaatccaacttaagcaaaatgttaccaaaaataactcagattacagttttaattgttgttttatttatttcaaagtgattttttgtgaaggccagacatacttttattctgaacacttagaaagagattatcttaacatactgatatattaaaggaccattgaccagtatccaaaaatggtactaatttaaataaaatatttatctactgagttctataatatttctctttagcataatgggacagtggtatattaacccatgataattttcattattactttccatgtcgtccccttatcaaacaaatatcatataattcactatttcagattatacaggtttgcaaatatttaattttagacagtagaagacaccttaatgagctttttttcataaaatacattatgactaaccttcctctgaaggatttattcatccaaaaatatagctgagttcttactacatgctagcatactccagttgcttaagatagaaagatgaatatcaaatagtaaataaagacaagcagtattcagagaaatagtttcactagactcactctgcctgaaaaagctaggtacttccactttagccatcagacctggtatgagtcacagttgggtacaccagggagcagcccataaaggccctgctgtgagcgttctagtatagcccatgacatgaggataggcttaatattaagaatggacactgagactgatgcttctgtctgcctcatttaaatacaaaactgcaaatatttcctttaatttgtatgcaacttacaccttatcacaggacactacaataggaaagtggaatttatggtgcccccttcccaattttgccaaaattggggagtttctctagaatagactcatcagcttacaaattccctttttgaatggaaagcatagaagtggagcaggcccctgtaggaatactaattttaactgtctatatttcgcatttacttttcaagatggaaagtactagcacgtgttttcaggattagtgaaaattaaccaatacagggaaagaaagtgataacactgtggaaagcaggaaaaactacagaagcaaatgtaggaaaaggtaagaaaggtgaagggttctgaaacacaagtgagcacttggatatcatagaaggagggcactttttcaccttaacagggtaagaacagcaacgaggaagatgctagtacaactctcaatttggtaatggcaaggtaagggagccctcttttgatagcttctattttattttttattaagcataaatatattatctgcaagatgaagagaggttttagaagagaagagaaatttctttactcattagtcgattggcacttgggttgattccacatctttgcaattgtgaattgtgctgctttaaacatgcacatgcgtgtgtctttttcacataatg

SEQ ID NO: 28 - DNA, 2695 bp, synthetic construct
  misc_feature 1..2695: note = Description of Artificial Sequence: Synthetic polynucleotide
  source 1..2695: mol_type = other DNA
gcgctctgtgtgcagcgcgaacatgtggaggtatgctttagagaggagcacggaccctgcttgtatactaacaggcggaaaagcagaggaccattttgtgtcagattgaaattccacatactggaaagcccattcctcagagagtgtgcgacaacagcatcaaataacttccataactaatgtttttcttttgtaaaattaaagtttataattaatgacctattgtggttactgattatcttgatagacaggaggaaaacagtgaagagtagtaagactcaggcttacatgcagaagacacatcaagaatagaacagactgcctaacatcactcacctctatatcacaggctttcacgttttttaccaattgcacttggatattgagtggctcgctctagcctatactgtaagggcagtgtgttggaccaagtgaatgtctatgccacttcacagaggtaccattccagatgtttactagtgttccaggtgttgacaagttaggataaatgtgatcacaaagatccttcctttttaccgatcctggctcctcctttgttcagtggccaggcctggcttctgtctcagctagatcattttcttctacaaatttttgctccactatcaagtcctttttgccttttgcacaataaatcttagaaacaaatttgcacatatttattagagtaccctaataggctaaccctcaaatagcatttgctttattaacaaaatgtttaatcaataaaaagaagcagttgatgggaagtactgagggttgctcttagaggtattcttgaatagctctcaggtgtgggtatgtctagcatgtgatttactctgcttactgcattttactctttttttcttatagcctacttagttatatacaaacaacttcattcaattcagcaaatcatcaagtagttattgactaagtgtcaagaactatgcttagttcttagctcaagctactgaaatgatgtactgctctctactttagggctgcagataagttggagaaacaaaattgcaaaaggctgctctccctataataggccagatactgtaacaaacacataaccctcgtgctactgacacacagtaaagaatctagcctagcagagtctatgggttcagggaatgttgagactcacaagagttcaagagtgagcagaagtgcaccaggctaacaaaggtgggaaagatactcctggtaaataattagatggtaaagagaagatagatataaatgacagatagatagataggtgagagagagaaagagatgatagaaaatatgctggtatctgtatgtttatttgaatgagttgggtaatctgaaatttaacatgcaataatatctagttaaacagaactatcccttctagactagataaatatttccttgcttggtaaaatttcaaaagaccattgtattctcaatgttgaagaaatagccctgcaccttagagaagaaaaaaatctgtcaggaatacactattttctagtctaacttgtttgtaacagaggccaaaaaaatatggtaaaagccattctctacacaaataaattgaaaagttctacaaagttcaaatgttgaccacacagtgaacctactattgaatttttagatgtgtttttgcttcaaagatgtattgacataaaggtcctttgaaggaatataataattcttttgaaatcattttgaatataccctgtgcgatacagattgaatcatttgtccaagactttttatttctgaagtttctgctgaaagtcaaccttctctagaaccattatcaagttgtaaaagtaaagatttctaacagccttgaggattttgaacttgaagaaaaaaaatttagacattggaaaattgtctttataaaaagtataatatgcaatttaggatctctaaatgtccaactccaacactagtaataatgctttattgccaatgggatggactactcaaaagaaactgacttactgcatggacaggatttatctctcaaactttaatatttcaaaattattctgaattcatttttgaaaaagtaagaatatctgttttctactcaaaggtaaaactctgttgctggtataaatgaagaagttaaaagtagtttcaataactcaataataacatataataatgctaatatataataattgcatgatatattatatattacaatctattattatagtgtgctagttttagagtattgatgttttattgcctctctccatactccttgccaaaaaataatcaagtaaagaaacaacagggaataaagtaaatcccatttcttctaacaacatgttgaactaaaaaacaaaaagatagtagttgatgcttagatataagtaaggtttttggcaatacttgcattgttcacatactggtagaatgtgctgtggggggtcttatgcaaagcagattcctgggattttatcttttaaccagggggtcttagggataacactattttatattagtttactacgatatgaatgactgtttttcttggccatcacttcctcattgtgatagctgtacagtgttaaaaatagatttttgaatattagacagaaaatagaaatgcacatttttatagaattgcagaaagactaagttatgatacatattttaacgtatactttctcaaattctgctgcacacagagcgc

SEQ ID NO: 29 - DNA, 2691 bp, synthetic construct
  misc_feature 1..2691: note = Description of Artificial Sequence: Synthetic polynucleotide
  source 1..2691: mol_type = other DNA
gctggaggctggaagtccaagatcaaggtgccagcagggttggtttctggtgagggctcccttcctggcttgcagatggccacctgcttgctgtgttctaacctctgtgtgtacagagaaagagaggggtggaatgcaaatcaatgttctgatgtctcctccttttctttgaaggacacaagttctatcagattgggacctcagccttataacttagttcaaccttcattacctccttaaaggtgctatctccaaatattgccacattgggggttaggtcttcaacataggagttttgggagggacacaattcaattcatggcctcactatacaaatgtgggatggccgatgtccagggtacccctgaggagtgcgaagcacagcctgcccagggccggcccctctggggctgcaggcacatactcgcctgcatgtgcacacgcttgccacaactgcacttgcctcccaacctgcccttcggcagtcatctggggtctttctctccctagacccccggactcctggaatccaactcacctggtggggtgggggtgtcatagccaatcacactgcaggttacacacctgagggtgtgagaagtgtgagcctatggccttggtatccccaccatagacagctctggaaatgtcctgcgagcccgaccaggcagagccatggccacccatacaacagtcactctgcccaactcctggcagggtgcaataacttaaaaaggattttgatttatatgactgctgttctcatgatttaagcagcatcctatggataaaaccccacagccagcatcccagcctccacccccaactcgtctttactagagggaccctcccagcatcacctcacctggccggaggggaggccacctgtgggcccccaggcctagtgacagacaggccttcccatgtatgcagacactcctttgggccagggcggcatccttgcttcatcatgtaggctctgttgtggcggccccaggccccttccacttctcttgcagaaatcctatcctcttctccagaaggttcctcttctgtttgaggcccctgcctcccaggcggatgctgcccctggcaggaaggcatgctgcttggtgacacaggcaccaaggtgtggcccactagtttatctgagacaagggcatgacatggtcccaggtatggcccactggttaatctgagccatagtggatattctctccgtctgcgttacactcagggctccacgcgtttcaactctttctgtctatactcaagcagctgctttcctagaacctacggcaggaggtatgggaaggttgggagtttccagaatcacccacagacccatggccagccccagcagacccccccgacccgcagaccttgggctcctctttcccctaaggtgggtttccttccgaggcttcatgccagttcctggaagctggctttgagcacagccaccttagtcaatcaggcatgtttttgcctcatcaaaagcctttggagaagggtcaggctcctatgccctttcttccctgagtaacatcagggagcaggtgtgtatcttggagaagaggcacagctcctccacctggctgcattcaaatcccagcaggaatgactgtgacaggcagcagtgacacccaagtcctccccaaccgcacccagcccaggcccttccacagtggcctgtcacatttaccacattctggaagaataaacttggtaggtctccttcatttattcaacaaacttgctttgtaaaggctgtccgtgctcagcactctgggtatgagatggaaaatacccagttcctcctctcagagaactcacagcctgcaaggggagacaaaagagtgaactggtaattacagcacatgaggctgctgctgggcttcctgagggagtcaaggagggcttcctggaggaggacacttttaagctgattctaaaatttttttttgttttattttggcataatctcaggcttaaagaaaagtcacaagaataacaagaaaaatttcatacagcctcatctaaattccccaaatactaacatttaaccacatttgccatatccttctctctctctctacctaactacaactaaatacatcaactaacaacaaaaatattcctttacataatcatggtacaatgatcacaatcaggaaataaacattgatataatattattatctaatctgtggacttcattcagatttctccactggctccaatcatgtccctcaaagcaaatgcaaatccaggaccacatatcccatctctgtagtattctttaacctggaagagttatgcagcctgtctttgcattttgtgacattctcacccttgtagagtataggccagttattttgtagaaggttccctgatctgagcttagtgatgtctccccagagttctatccaggtgatgtcaggaaccccgcacaagggaggtacgtcctcctcagcacatctcataagggggcatgggcatccatttgtcctgctgagggtaatgttcattctgataacttggttaagatggtatcctccagagttttccactataaagttactgtttcccccttgaaattttttttttttttttttttgagacagagtctcactctgtcacttaggctggagtgcagtggcgcgatctcagctgcgctctgtgtgcagc

SEQ ID NO: 30 - DNA, 2671 bp, synthetic construct
  misc_feature 1..2671: note = Description of Artificial Sequence: Synthetic polynucleotide
  source 1..2671: mol_type = other DNA
gcgctctgtgtgcagcgcatgcttaaagggttggatacccactctccgtgatgtgattagttcatgtttcatgcctgtatcaaaacatctcatgcaccccataatatatatgcctattatatactcacaaaaatgcttgaaaataaaaataaaggaactactgaaggtcaggtcagagtggaaatgcaaaagtaccaattagagaataatgtgaatacaacaggaatcctgttggtattctatttatattgtaagcagcagttcaattgtcttgtaaaagcaatttcaattttaatcactgaactaaagaaatgggcaacactgacttccgtaatataggttctacctaaccatctctaacaccgctgtcaaggaggtccagtgttaaggtacattattgttataaatattagtgagcccatacttctgcgatataattaaaccaacttaatgattctcacataaggtgtcaatttattttactaatgcattcataatctatgctttgtagcaacatttttcaaatgtttaaaatgctaaatcttctcaattttccaatcttttcttgaatctattagatacctatagtgtagttactgaatagctgggaaacaaatacacctagttagaaatggcactgctttataaaaggcactagagaaaagatgagactatttctatatttaaatgctgctggcaaatgaattcctttgtatataaatgaaagataccattcattaaaatgaaagacttaagtgtgattcttacatttcattcatttatgatagagtaaatgcctttataattactttaaaatttaactcactagtacattaaatctgttcattgcaagattagaatcaaatgtgaggggaactaatttaaaaaagcccttcgttagtcttattgagtctcatatttgctgaaagtacctacagcttgcaggataagggagttcacggactatagggtgagtgaacccatgcacagattgcaaactgcccagagctacaacatttaggatttttagacctttaattttccaagtcatagaaatctgttacaggttcatcacatctttgtctaaatggcaactgaatttctttaaagataggttaaaaaaggcataaaactatgaattattatccgtttgcgtgcctctatttttgctttagaattatggaagtggatcctgtgaattagggaaacactgttatgtatacacatgggtgaaaaacaatctaacattatgtaaattaaaatactttttttgaagttgaaaaacatccatttgttctaaatctatatatattatgtgtatctagtacagaataaactgtaacttgtcattgagtaatcttaggttttacagatatgtaaagctaaagcaactctaaagagtagacatttcagaaaaggaagattctggtcaatgttgagagtagacactttcactgaaggttctggtgaaatgtgggtaactaattgcttgaaatctataatttgctatatagttaactattaagttaaaatgttatttaccatgctttttacactaaaagctttaacttttctgagaaaataatattttaaatgttcaattattacttctgaggacagctacttctagcattctttgtcatgatgtgcttgtgtgcagtaagcagagcattttcagccacttacctctacattcttcctgtttttcaatttctgatttagattataaaaggcaaatgattaatttaatttgatactcagagttgtgtttacctttcatggacaaatatatgtcagatactttgatgtttattgatatgacaccgtgtggttaaacaacgcaagtatgtccacgtgtttcttatagggtacacttgaaactagtggtgtttatgcagttcacttatgtaacttgaaaatcttgtactattgcattcaggactgaaatcttggagtttatgtgtcttgcctctcattttgaaaataagtgaaagttgagaatgtaaaatcaataaagttcatttttttaactaggaaaaaaacacaaattaatgacagacaccaaattacaaatccaaaaagctcacagaacaccaagcagaatgaatattttaaaaatatacctaggaatatcatattcaaactggagaaaacctgtaacaaagataaaagattaaaataaggcagaggaagaaacacattgtctacagagaaacagacataaggattacattggacttctgtttagaatccatgcaagtaagaagtgttgaaaaaattagaatacagtgggtatttattatccaagtattcattatctaaaactgcaaagcaaaaataattgtaacaagaacacattcactagcaatctgaacactcatggtattagtgtctgttctggagagaattatgtccccccagaattcctaacctgaagccctatctcccagtgtgactgtatttggagaaggagcttttaagaaggtaaaggttaaataggggcaaaagggtaaggccctaatctgttaggactggggtcatcatccaaaaaggtagagacacaagagatatatatctctctctcttctctctctctctctgccccactccttctctctccctccctctctccctctctctctccctctctctctggcgctctgtgtgcagc

SEQ ID NO: 31 - DNA, 2664 bp, synthetic construct
  misc_feature 1..2664: note = Description of Artificial Sequence: Synthetic polynucleotide
  source 1..2664: mol_type = other DNA
cttccgatctgcgctctgtgtgcagctgtaagttttcctcaaaagaaagggtatggttgttttttcgtttgcttgtttgtttttgttttttgtttttttttcgcccaaaagctactgtgtggcagacagagcttgggtttggaaatacctggctttgaacctaaaattcacagtttgctaaagttatatcaccttagcaactgtctgatagtattatttgcatggatatctaaactcaagattgctgacagggttttgtgagatataaatgtttcttatataaaactgaggtagctaggatgggaaagttgaagagaggtaagatatgttaccccttttataacacagtgtttcacaattctggttccagaagaagagagcctaggttcaactccccgctctcccactttcatcttgaggatgctacctaatctctcagtgcctgttttcttatttgtaaaagaaagatgataatagaacttacttcatagagttgctgtgaggtttttatatataataaatatatgtaacatatataactctatatagagagagaaatttatgctggtttttatctcatatatttctacaaatcttcagaacaattctgcaaacgattttccacattttacatacgagggtcgacaaacttaagcagtttgtccaaagtcatactggctagtaggctaataagtatcacagtgaattgtagaggcacctctctttggcattgcgtctcagaatatgagtcacaggactatatataacctcataagcctcaagcctataagggatgatactggtaatataatccagttattttctgattcttgcatagcctctttagcaattcaacaaatagttatctaatctgtatttgaagagtacattcttttggaggtgagacattctgcctttctatagcccctgactcttagctcttcaaagatcttctagggctctacctgttcagatactcccacacccttggtggtggcttctgaaaacattgaatgaagcacagtttgaaaataatcatcctatagtttgtttgcctctatgaccctatctccctgtagaacttggcaaggtcacctaagatggagagaactagttaacagaaatcacattgttatatgtcagaagtagcgtgatggcaaatctgttccagtttggcgggatgtgctcttttcccaaaggattccttcccagacacttagcattacatgtttagtttatgtatattcagtagttcattcatcagtcatattttaagcctttactatgtgccagggtgtgttaagtgctagagatactgacaagagtaagattacatcacagtttccaggaaaactcaaagtgtggatggggaccatacataggccaacagataattacaatagttataagatggtgcaataattctatattatatgtgagtccaggatcctatggggatggatacaaagatttcatcccagtttggaagtgtcagcaaatgtgtctcagtgaaggagatgcctgtgttgtgctaaggatgattcggaggtaaaaaaagaaggagagagaggggtcctctggcagtcgaggactgtgtgcctctgcaagcttcccttaaccatggtttttaactttcccttggctgagtgtttttccacgagattaagaggcagacaaaacagcaacaataggtgccctatgacatcatgggattaaatcataaatatggcttggggtggctcagatctcctcacatgttaatgtgctagaggtagaagtagaggcaaattaaccatgaagtagaagaggtattttaggaattgtatccttatttttggtttcagtttgtggctcagtctccaaaaagtgaatctaagttattacaagcaattaaaaacatggcgttaatgattcatgtattttcatttttttatttgaaatgcctcttaggatttttcctccctctctattcccgctattatcacactaaattaggctcttatcacttgacacttagtgtacagttgttggctcccaacttactttctttgttccctgtttttctcttctcttgctaatctgttatctctctaccatttccctaaaattccatttttacaagatcatttcccttatcgaggatgtacagtggctccctactatccaatttattaatcacttttatttatctcttgattggcttttagatcatccataatttgcctatactgggcttctccagccttagttttaacttagtactaaatatctcttactaagtttcaactatagtcaaactagtctccctgccttcgtgcattattccataaatacttgctaaaatattgtgtataaaactgtgaccaaaagagacatgagacctctcatcatggtacacagagtcgattggagaatacaagtgttaatagaataacacattaagaaaaagtacagggacataaattagtcttttactaccttttcacaatatatgtatgcatgcatgtatgtatatgcacgtgcagacatacacacatacttctgttgttttcatatctttccatatgctaaatctgttacaagggattacttccttcttttactaccttataagtagagcttctcctgaactacctttatctattactaatgtgtcatgcatgc

SEQ ID NO: 32 - DNA, 2649 bp, synthetic construct
  misc_feature 1..2649: note = Description of Artificial Sequence: Synthetic polynucleotide
  source 1..2649: mol_type = other DNA
gaagcccctataaaaagtcagatactgtgtagaaatcaaaattacttaatggggttacaaattcaaatgtccaacaagtgccaggagggaaatgtgaatgacacagcagcccagtaagacaatagagagtggtggaggctaccgagaactgaagactaccacccccagttgaagggggaaactgctgctcagctccactcaacggtagcaatcccaggaatgtggggcctgtgttgacaggtcttcaaatattttaaccaaaaaatcattgtacaatggtcactatgtttaggggagaattggagagtagggggaatatctcttgatttttaaaagctgtcaagtatcagaaaagttttaaacatgctgcaaagccaagtaaaatatgcctgcagtcgcaggcagaaagcaatccaagggccccagtgggtgacctctggatgtcgcagagtctcagcctttttggggcttatgtgttggaagataagacatgttcataaataactacaatacagaacatggtgataagtgttgtgtgagcaagataaagtgctaaaagaattaagaggagggagagattactgaacagtgggttcctaaggagagagaaggggtgtctcagaaagctatttctgactgcatgttgaggaacccaataaactcaaggagggaggaaaaaaagagatatccaatgatctcagtaagccggccaggaaataattgatgcagccgggactgggcatcagcatatcacagggagcatttccaagatgcacatctagctcttacccctgacatcctacatagaaattccttgggttgaagatcatgcacccaagttttaaaatgtctttttagttaattctttttcaggcccttcattaacttctgctctaaggagctgtcccctaaaacactgtctaaaacaacaggtatgtctcttttgtcctttctgtatccccaaattcaaataaactaggatgcacaggttgtcaagtttttattttgtgagtgtatcatctgtgcctgtacctgggattccatcctgagccaggcaagagccttagtaaggcactgccttagcctggaggagaacacaccttcttgtacttatccatttggagcaggtgccattttgttattcccaaaaaggcactctatgctacagtggcctgcagattaccaaggaattgatagatttccaagccatctttctccaaagattaccttaaaaaaatataatccttatgttgacacgagttgtatataaaaagttggcacaagtatatattgaatttgcttagaactaaggatgggattgatatccaatacagttataaaaatccagaagttcacgtatgcttttccaatttataactcaaaattctcatcagaacctttccatacgtgccttagttttcagcttctttcaggaatacccaggctcagttttccatcaaagacacccagaaagcaggccccattgtttcactattattgttgccaaatctgccacctctctcatcactggccatcccccctgaagggttgcttacctaaacaccaatctaacctaacaaatcttacttcaaattgtgcactgtcctaaagaagacatgcgaggaatgcagtgttctctggttgttgaaacatatgcatttcaaaatcaaggaagccttcagtatgcagaagttgttagctttcttggccccttcctcttttgagctacaaccattctcttccattctacattccggtaaaaatgcaagttgtccatgccttctaagcttgtgaagtaaaagaagatgtggataatgggaaagccttagtatcacgaaaatgaatgactccataaagttccagtggaggtaattaaaatgagaaatgtttgcattttgtgaactacatgtgctgcccaaaataaaattaggggtacactcttgaatcctgcaagaggaactgatcccaggaaacttcttacagtcagtagggtggaaactgcccattcagcttggttatgggcttgtgcactcgaaaaggggagatagtgagccctttaagcaataataccttatgttgtgtgcattttgtagttcagaaacatttttacatccacttcatcatttgattctcacagcagtcttaagagagaggcagagaaggattattattataaccaatctacaaagaaactgggacctacagggatgtgtagtggatatgtgatgctgttgctgccaaatgcccctttacccagctgccaaatgcccctttacccttctccaagttcacgtctggggaacatctgctcttgttttgagtccatgtgcttatagaagatgtaacaacataattgattactctaaggatggggcatgtgaatcagagccttaaactctttaggtctcacaaatttcttcagggatgggcccatagacttggttagagctaacgagatgcaagacttttatttgttggtagagtgatgtgcccactttccttcttaccctcacgtgatgtcttggaataaagtaaacatataggataatagaactagtagaaagagaaaggcttggttcagatgaaatcattgattttcccatcttggagcaattacatttccttttttatttttatttatttatatat

SEQ ID NO: 33 - DNA, 2585 bp, synthetic construct
  misc_feature 1..2585: note = Description of Artificial Sequence: Synthetic polynucleotide
  source 1..2585: mol_type = other DNA
cacccgtaaaagcaggagacaagaaaagtggttacaagaaaggacaaagggacgacaatggggccacccatgctgaggagtttctgtctcattcgatgcaccaggagaactgatggtaggattcgggggtggggagagacagaattcacagtaccagtaggagaaacagcctcaagaatgttgaaagtggagtctgaagtcaagaaataatggaaggctccctcacctcaagatttgctgaggtataactggtatacaaaaaaccacacaaaattaatgtctacaatttggtgagtttggatatatgtatgcattcatgctaccatcaccacaaccagaataataaacatattcatcatctccaaaagcttccatgtggacctttagggttttatttgtttttgttttgtggtatgaatgcttaacatgagaagtactgtcttaacaaatttctagatgcacaatatcatattgttaactgtaggcaatatgttgtacagcagatctctgggacttattcatcttatataactaaatttatacccattcaaaacaactcctcacagagggaatctttacaagattagaggcactggggatgcagaataatgaatggggaaacagaagtcagttgccatttaaaattggggaaggaggtatgagctagggagaaggacaagtctaagctgactttctggtttctagccagatggtgatgctatttaaagaacggtggaggctgactatagtggggcaagggtagacactaaaaatttagcttctgactggcttagttttgaagtggatcaaccgagagagctccatacaaatatggagccctacagagaagcctgggttggagaaacaggtgggcagttaacatcaaatctgcagaaatttaaaataatgggaatgagtacaactaccccaagtgtgcaggtgaaaacccagtatagaatacctggaaaagatttatgtttaaaaggatacaaagatgaactagaaaacaaggagtcagaaaaataaagattgaactggaacaatgaagagttagaaaatccaaagacttaaaggtggagcaaaagtggtcagtggcatcaaatgtcacagagaaataagtaaaaaaaacagaaacgcttctacaatatgcttcagatgagaggtcagtgctccagagctgttgttgtggagaagacaagaaacagaagctagactgtgggaggctaaggcagaagaggaaacaaattttttatgtcctctttctaaaggctgagttctgaatggaagttgagagaaagggactgccagatggaaacagaggtgtgacttggccatcagtaggctgaagggaatgtgcttggaccagaaagaggcttatcgtgtattaataataggaaagaattagaaataaactctaggagaactgttttatccatataatggaataatgtgcagactctaaagatgatagaaggctgttcataatatcagacatacaaatacacaaatgcatcaatgacattacatcatatcaatattatatatcatactatgatgtcacctgaagcataatttgtgggggctacttgggatacataggtgtgttgatcttagggcaggccagttagggttacagatgatgttcctgctttttgtaatctctgattttctaaaattcttatgtttaatatatgtaataatacacttttaaaggaatcaaccccctaagtagaataaacagaagttcaataataggccagaatttcgggacaagagaagggatggcatccatagcactcagaggtagaaggagatcctaatttactaatttgcaagggaatagggacatctctacattgcaataaaactgtgcagcaatttagaaattctccaaatcagtaatatatgtagaatgagtgaaaattttcattgttaaactatttagacatttacaaaaattttcatatgtgtgccattaagtgtttttgcagtaatctcaaaacatggaaacagacagctataaggctggagaatttggagtcagggggagtactgtaagggagagggggaaaaaagaaaacaaaactttaaacagcccggtatattttagtcaatgttcctaaatgccactgtgaaacaaagccacttcagtttctactacctgaaactaaaacacacattaccctggtcaaatgcttgggtaaatgcttgttttcaccgtgaatagtccccatattgttcagcatatcacctcctggattccttaatattttttttcccatcaaatggtctaagccacaattagagggaacagttccaatgtcaaattcttaacaattctcttatccttccaaattctgggaaagatcataggtcttataagcatgtgcccagcccttttactccccagcatcaataaacaacttggtctgtctcttaaggaaagactgtactttgcctcacagctaatttaccaactatcccagaacagacaatccagctaccaaataaccagtgctctctttacccagatgttgaaggtactctttcttatgcccacaacccccacccaacttttttctctt

SEQ ID NO: 34 - DNA, 2565 bp, synthetic construct
  misc_feature 1..2565: note = Description of Artificial Sequence: Synthetic polynucleotide
  source 1..2565: mol_type = other DNA
gcgctctgtgtgcagccccacaaacatctacccggcaagcaaaggaaggctgacagtgtaatggagggtgaaatgataatgtcctctttcgtaaatggaatccagccgatgataacaatgcactcacacagatttgcagggcgttctggatggcgtttcaaatatcccattcccctgcactttaagaacctgcagttgggtcgccctctacacaggagacaagtgaccattttaaacagactgagggaaaacctacaccatattactagagcaattatgtcagggcagaaacagaaggaggtgatggaggaaaaaagaataagaattcaacgaggcaaaattcgcagaacacacttaggattgggagagacaattcaagggaatgcaaatgaaaattagccagctaggaatctcctattatttagaagcctcaaactgttggtaactgtgtaaacattatgccctgtttggtagacattctggtaggtgcctgtgtgtataccctttggtgcataaatttcacttctagattttattcaatagaagcacacccaaccttgcaaaaatatatgcattccattcagtgcactgtacgcactgcactcactgcagcacttctgagtaacaaatgtgatggaatgctctgttattcaaatacatttgattgaaataagagttgctgaatattctgtaaaatatgaatccatttttgcgaaaagactgtgtgctcatatacacagaaacatttagaatatgtgccaaataaaagagaaatgagaacattactgaattgcttaaaattattacatacattgcctacattaaaaagcaatgaacctataaacattactattaattaatggttcttttatgaccttggccttctaatataaattcactaacatatctgatccattctcttatccattagagtaacaaagttcatgattttactataaaggcttcaaataaagaagttcagagtgtctttctagttgttgaaataattatgtaaatagtgttgaagctgattatttatgttgaaaatgaacaaacagatgcacagtgagggttaatgggatctttaatgggtttctttatataaagggacaatttggggtaaaaaaaatttttttcttaactcttctataataactggcatgcctacttttaattatcttagtcaccctctcttctttattgagttgacactgtttgtatatcttaatgaacttacatagattatttcaatcgattggttttgttaacagaacaataaatcctgactgataaagaatgcaggatgtaattagttagctcttcttattacgtgaatttctgatacttctgtaatgagtaattaaagattaataagaaagatagtctcatattagctgcttcttatctataaatgcttcaggatgtgtggggatcaagccacacttgcattctcaccactaggctggcaactagagtaacttggcagcaaacccaaagttctaactatctgaaagtcttcttccaaagaactatgcctcaaggccatataatttcatgataagatggctgagtggatcaactatatcctcttcacttctgctcaggaaagggtgcaaggtgaagccggacaatgtctgagccttcaccgtgccaccttttctggctgtgtaactcaaaaagtcacttctgcggcttcatgcctctgtctccatgccacatagcacagagctggggtgaggattcagtgagataatccacacaggacacttagcaactgacttgcacacagtgagtggaaggcagctgtggttattattcattcaacaaatatttaaactcctgctatttgccaagcactgcctaggtgctggggatacatccatgaatgaacaagactaacccctgctcccaaggaatttagtattctctttcttttccctttcgtctttaggatttcttaaaatcagaaacttttgttctgagagtctgatcagaagaggcctgtataggcaggatactaattcaggcaatcccctcggccaccatgtcacttagaggcccaggccctctgcctggagaacacaagtgggtgtcacgcctatgcagaaggcagcccagtcataaggctccatccatgacaacatactctccttgcgggtttaggggagccatgcagaccacagcaacagcattctcggagcaccctcttcttttgtatcccaccactggctaaggagccctgtgcaccagcttgactctggtgcatcaactcagatgatcccagcagcaaccctgtgggcaaggtgagcacacctacttcacagctgaggtagctgatgcccagactaaagtaattagcccaagacacacagcatatgtggtgaatgggattcaaaacagcccaactccaaaacccaggctctgcgcccatcaccatgctgcctccattgtccatagcaactactccacctcccaaatagatgtgatgtgtgttattttcatgcaaaagagtaagtgtccaccacacacacacacacacacacacacacacacacacacacacac

SEQ ID NO: 35 - DNA, 2548 bp, synthetic construct
  misc_feature 1..2548: note = Description of Artificial Sequence: Synthetic polynucleotide
  source 1..2548: mol_type = other DNA
ttgctcttagaccttcttcttggaaggatgtctattgctaaaattaagcaacagtataacctcatcagtgatgttctggctctgataagaaaaaatgactaaatctctaaggcagctgtaaggtttagctggtatgtaccagcaggagtcagaatacaatcaaattaggaacacatttctggatacatgacttaaaattctgtaaagggccacatgagactgtgcaaagttgccactacaatggctcctagatgtattgtaaaagttatatctaatactaaatatagttagtacatcagaattattgtgacagaccatagaagaagtatttaaaatgcccagagaaataaacaagatagaatagatacgttatctattctgacatatacatatacaacaaataattatgtaaaactgacatatacaacaaataattatgctctgttagaagaaacgggatacgtgtctcactaagacaaaaaggaatgcactggaaagaaaacacagtatctgtcttccatagataaggaatgataatataggaaattattaaggacataagcttgatgatggctatgaaggtattgattttactcttaatggaaggtaatactttggtctgccaaaatttcatggatactagcgaaggacgagattctcctggatcagagacaaatttgtacttacagcaatagccatagtcagagtaatattaaagttactggcaagcagaagcaaggtggctttttgtgtggaagaaaatatgacctgatttttcagaactagtagctgcataaacaatcctaagaaaagtgacaaatccaacagtatgtgtaggagtgcaagggacccatgctggactctatccaaataatcagtgtgcatggcagggctccaaaataatagagtccaggtggatgcaattactgtaataagtggcaagtagcaaggtcagaccatcacagggagacctgatcctcagagatttataacaacagttaagagctggccaagatggatagcctcattcctcctaggtccttcctcttgctactaaaatatactgagccaaaacaacaaacaagcataggaaaaactggaaaagttggaaagaagttggcagcctactaaaagaccttgtgctttgaggaatgactcagcagtgggtccttggtttccttactggctttcatatatctcagacaggacgttgcagaagtctacaagccagaaacaccaacaggcaatgacaaataaaagtacacacacaaaaaacctgactttgtagccataggactgagaaaaaaattggcctaaaaaaacaggaaacatttttcataatacaaactatactccaaacaacctcagaaaaccattctcttcatgcccccataatttcagctgtgatgaatggggagttgttcattcactccaccttgcctacatccaattaatgattcagaggttagatttatctaactaagatttggaatcagtcatcacaaaattgctttagcaagaatgatgaatctgttgaatcaaataaaaaaagaaaaaaatgtgataaagatataaaagttacagaaaataactatatgcaaattatagagctaaacaatgcaatgacaaaaaaaaaacaaaacatctggatggacttaatagtagagtggagataacagtacagactctgtgaactagaggtcagatcaatttaatttatcaaatctgagtaatacagaagtaaatagactaaaaaaaaagtacagaatctcggagaaagaatgtgggtctgagaaaatattcaaaggaaatgtggatgaaaactccccaagtctagtgaaagacataaatctacagatttaagaatctgaatctcaaataagataaacctaaaaaaaatgctaagacacatgataattaactctcaaaaaactaattataaagaaaaatcttggaagcattcatagagaaatgacaaattatagagaaaaaaatttctaaaacagtagatttttcctctgaaacaatgtaggtaaaaaagaaatagcatcacatgtttcaagcactaaaagaatcatcaagggcaagttctatatgtgacaaaactatccgtcagatataaagacaaaataaaacatcaccggatgaaggaaaactaagacaaattttcactaaccttaaaaaaacagctaaatgaagttcttggaacttcagaaaagaaagaacattgaaattaatagaaataaaggtaaatgtaatacactattcttataaatttattgaattacatcagtttgttgaagtaaaaattataaaatacattgtgtacagtacatgacaagcgaattcttaattataacacaaattggggagggtaaatggatataattagaagatttttacattaattctacttggagagaaagcagcaatatcagtagactgtgttaaaatgcttatgcatattttaatacttagaacaactatgaagaaaaccatataaagcaataacttaaaaatgcactatacataaatcaagggcgctctg

SEQ ID NO: 36 - DNA, 2548 bp, synthetic construct
  misc_feature 1..2548: note = Description of Artificial Sequence: Synthetic polynucleotide
  source 1..2548: mol_type = other DNA
gcgctctgtgtgcagcgtttggggatgttaccagcatcttcatttacaggctgagaatttttgttgtaaccagcaagaattatgcccaactgccatgatcagtctgtttttattatttagttttataagaaataagcgtcaatatcttagagttacgtgacataaataggactatgtaccttcatattttggtaaaaattagataaaatattcagtaaacatttattcgataccttgtatctgcactcagtttcttgggaaggattaaaagaacttgaaggaagagtacttgtcctccaagatctttgcatgtagctgaagagataaaacatgtgactttttatagagaggttgaactgaataataattggaggccaactgacccatcttcctgttgacttctgtttatcccccagatttcattcagagattcctctctcagctcttcttgctttccctgttttttctcttcccctcctcttgaatttaaaatcatagtatctgaaagtaattatagtcaaaaatctcaacagagataacgctgtaggacaggggcccaatctttgggggcagaagagtgtttaaagaaaggttttaggttttcaattataattcttaataattatgacaaggttcgtcttttgaaataattattcagcatttaattgcttaatagacattctaagcacttgaacctgcattacatttaattctcacagtaatgtttattattcccgttttatacctgaaactcagagagctttagtctaagttgtttagtgacacagctagaaaacagcagcctggatacaaatagagatctgatgccaaatttgatcctctttacattatatgacagtcttttcaacttgctgtgccaagatttgatctttccacacagtagcacatagcagttacagcgccttcctctcaaaaattatattttaaaagtaaagatcagaggctattcatcttgccttaacccttcctcctttgcaggaatcctaaaatggctagagcaagttaaccataggtgagcattgagtaaagatcaccatttaggaggtaatccttatggtagggttacctctgttactatctgcagagacaaaacagatactgaggtatttatgaactgtgcggttcccaggactgatgattttcatgattacttatgttgcaaaacataagtttaaagataagccatcattaatgctatcttactttttagacaatcgggagaagatagcaagatgctagtgtgtgatacgtgtgacaaagggtatcatactttttgtcttcaacgaattatgaaatctgtaccaaccaatggctggaaatgcaaagtaagttgtttacttttttaaatcctctgtatgttttatatggagaacagacaaatcggatatctattcaaatctatacattaccatcagctttttaaaaacagctttattgacatataactgacatacagtaaactgtacactctccaagataatgaacatagtcatcaccgtcaaagtttcctggtgcctcttggcttgctttgtggctgttcaaacccaaaccctctgtcttcctagtctgctttttcactatagattagtattcacttcctagaatttttaataaaagcttcatatagtatatactcgtttttggtctggcttctttaactcagtgtaattattttgaaatgcatccctattgctgcacagatcagtagtgattcttttgtattacagagtgctggagataccacaatttgtgtattgaatcacctgttggtgaacatttgggtccttcaaaattttgagctattataaaaaatgccgatgaactcattaactaacttcctacctcacttggcttctgccccttcagggtgaggcgttcagagccgggttgggggcagtggggtagtggacatagccctttggaatccaaggtgcggtttagcttttaagcttagtcttcctgggctgctggtgtcgcgaggttgagggatggagatgaccctcaggtgctgcatgggcctggagcgggttctccctggagctggagagggcgtgatggcccgtgtgcgggagtggaaggcacagcattgtcattgcccttctcggaactgctttttctagggaggaggtggagggcctgggaaaggagggtgatgtggccagaaccccaggtccctggcgtggggaggaggtgggagcagacgcagagagattctgtacctgcaccctgtcctcgccagtgaggtttggcacctagaactgcaagcagtattaccaggttctgttgtcctcttcagcaagttctactagacatctgcctgagtggtgggggttgaggggaggggctttctctcctggggggaaaaagagctgctgggtaactgtgctcagctgtggctacctgggaagtgggacctgagggctgaaggattgtgatgaactctggccttcttcctcaggttgttcagattccttctcttgctgaatgacatcattggaaaggaaaaactctgctgtttgactaattt

SEQ ID NO: 37 - DNA, 2529 bp, synthetic construct
  misc_feature 1..2529: note = Description of Artificial Sequence: Synthetic polynucleotide
  source 1..2529: mol_type = other DNA
aggatttcttaaacaggagtctgaggattgcttcaagggggagaggggcagagattgttttttttttttttttaaagaagcagattctcaaagggcttcattcatgtcctcccaaatattgaggactcactctttagtaggaattccatgaataaaggaataacatatgacatctgaagtggagttgtcccttattatcctgtttgttttcaaggtagcctcacaaattcaaatggcgtcccctgcacccttcaaactcgccctggcattcagaacgctgctattctctgcttggaagggtcctcgcctggcacagcaaactcccatgtttaccagaatccgactcaaatctcacctctgggtggtgcctccttagacccctgggaagacctgggtaccctcctctaagcctgcccagcaccctctctgtctctaacacctgtctccctgtcctgtagtgacttgctcacctgtcactatgttggaacaccttgctgtattcattttcccatccccagcattgatctctgtgccaggttcacagaaggtgtccaggagatcgctgtgtgattgacagtctggaagctgggctattaagggcagttgtccagccaaatctgagtgaaactgggtcaggatttaaagatgtggttagtctgattcacatagactctgtaaatgtcactgaagattatcactggcatttggatggtgtggtctctgtgaccacagggcagaaaattcaattattcagcacttgctgtatgcaaagcactctacggaatcccatgagtaggaggaagtctcaaagaggatgaagacattgccccttcttccaggagatgtttaagttctatttgattgggtcaagctcatataaaattcaaggttttgaggcttggtctcatgatcagactagccagcttgggccagaagtgttttgcgcttggatactctcacaggtacacttcatattctcaaactaaacatctggtaacacagagcagttggcaagataatcaggtttctttttgtaggtcttcggaaggagaacaattggatagtatgaggggatcatttgccaattatagatagtagccctggaaagcactggagagacctgggccctaacacggtggaaaagttcagaaattcatcgacgggagcggaagttagacacattttaatttcacgtgctgtcttgaatactgtgtaccacggcagcgtctttactcgagactcaaaatcatttgactcttctacaaactggattcccattcaagattttctcattctcctctactgtggatattagcttggaatagatcattagcgtccatatagaatttgaaatctttatttgaagttataaccgctaaaaatgattgttaaaatcatggtgtgtagattcagatatgaggttcccagatagcaaatttaagccttctctaaccacaccccttaaagggcctctgcggacacctccacccccttgtgagacccaggagtctcttccagagtgcagtagcagaggagtggcttccccggggaacaaatactgcgtggtgcaccgtggtcccgaccagacacgctggccctcctggaggcctcaggcattacttagaccttcagccaagtctctcttctgtttggagagcttgggaaagcagttttcatctcctaatggaaaatgaaaatctgtcatcacctttcacatcatcagcctcctggagccccctagtccgtctgactgcagttatgtcccagataatgaggcttcaagcaagccccctaagtgcacagcgctgcaggctcagccctctctgcactcctctttcttccccgccttcctctcttctggatctggatccccccacacctgctcagtcaccaacagcaacctgccgggtatcagctaccccactctggggtggcggtggctcgggtgaggacagggctgtgcctgcaaatggccccctcgggcctttctccctgtcccatcgctccctgcttctttcacaaaagtcaacatcacagcctgtaacccaaaggctgataggatgtgcggataacagctatataaccttaattctcaaacgatgggagacagccagggaatttcgtgtcagctatccactgctgtggctccgtggaaatgcttccagcacaaacaacctgtgtacactgcagaacctttcactcaggagggaggtctgagcacggctagtttttgctgcctcggaaggggtcagggctccctctgcagggagcccgtggttctgccgcagcagcggagcctccagcgccagtcggtgaccctcctgcccatgcctgggaggatgtgagctctggtgccccaggcagcctggaattgtgccctgggagtggggctggggcaagggagaggctgcagtgtcattacagggatgtcctcctttcctggaggtcactttgggcttgaccacgggctgtccactgcctggcgtggtctctgatttgctgctctctgcggacccttggttgtgctct

SEQ ID NO: 38 - DNA, 2495 bp, synthetic construct
  misc_feature 1..2495: note = Description of Artificial Sequence: Synthetic polynucleotide
  source 1..2495: mol_type = other DNA
gcatcccaagaggttgaggtaaggaaaatatgtaaagacaaaaagaagtctatgcaagctgttttgaaacaaacatcactggtcacagggcctgatgcaggagctggtgttaacttactggcagaaacagccattgctaggcaagtgttcttgtgagggtggcttatctgaaatgctgcagtcttgaggaattttttatgataggtcctattatagagacacctacaggatgagctggacaaacaagagtgtgctgggtgggcagaaatttcttgtgagtttatagaaagtccttgtgatagtgcttatcgtggacacacacacaagatcccctttttcatgacccggctccactttgctttgggtctgatgtaagtgactttgccttgtcattggcaactttcactgtagtataatctgcacattaaagttacctaacaatagtacaaagaaagaaaattaaaggtatatctctttcaaaaatataaaccccaaaattgttaggaaattgtagtgagtataaaagataattcattataatagacatctcaagcttcacagaattctgacctttgctacactctcatccacaatcttttctcctagtaaatggcagctccttctgttaagttgctgaggcttcttattgcttttttcttcaaataacagtcagaactgaacaactgtaatcatcctagtccatacaattgttatattttcatttaaagaagatcaatgtgtgattcttttttatatatttctggacaattctttatattttaatagtagtcagaatttgatcaggaaaacagaggacatcctatgtattataatgataaaagtttaatattaattagggccttatgctattattggaagagcttggtgaatagatattagaaaagcagctagacaaaatcagaagaggtctgttttatatcagagatcttagcctgacagtctagagtgtgggcacagaacccaagcttataggaatttctgaaaggtctgtaaatcttatccagatggacagtgggagctcataaaggattctgcaagccatcacatctgtcaaacctgctatgtctaatccttaagcctgctttatgtgaagacctcctcttcactcctcatttccagctctcatgagtttctttcataggcaaacccaaacctggaacaatgtgcctgaagacttcgggtgacacagtacccagacttaaataggaggggagccatggtggaagtggccatccagcacagttttcttggtctttactcatagttttgattccttaaaaaaattaaccacattaaaatatgtgtttcataatctacatctaataatacaaatatttaaagtcttttcaagtttgaatacgctacccatgttgctgctacccccattttgtgtgtgtgatttttttgtgtgtgttagaagctcatgacctttgaaacctgctcttatgagcttgctttgatgatttatttgtccagagaggattttttttcctacctagcattttggactgctatcaacctgagaccactttgaattaaattctcagcttgcaaatttggaagccacacagattgtgtgagttcaggctgaaacctgtttgagagctggattctggctataaactccacagggaacattttctctctccactcagagctgagaccatagggaaatttatttgctagctctctttgaaggtttattgtatttattttttaaatttctagtacatgtgctcactgaaggtgtaatacttatgtgagaatctcaaaatcagttgtgttctttgtatgaccctggttttgtttcctcctgctctcttactttcagtgtgtctcaatatgtctgctgatgctatggtcatcttaaattttgactgagggtggatcttcttcccagctcactcacatggttcttagctagattcagtttctctccatttgtaggactgaggacctcagttcttcacttagggttggctacaggtaatcatcaatttcttgtaacaggacttacactgggccactgacagcatgccagttggcttcattcaaatgagagggcaagagaaagagagagagggagagggcgcaagatgaaattcacagtatcttataatctaatctcagaagtggcatctcatttcttttgttctattctattcaatagaaacaagtacctgggaccagcttatactataggaaagagattatataagggtataaataccaagaggtagagatcatcaagagccattctggtagcagccacaatatcttatccagaatatttcttattcaggccttcaaatgtgctgtcttttctggtctaatggaaatgaaccttccttccatacaatttcttctcctaaattgtactctggctctcttatcatatacaaacgtctatgttaggtatttgtgtctgtcttgattcttggtaggcttttaaactctgtgaatgttggactgtg

SEQ ID NO: 39 - DNA, 2490 bp, synthetic construct
  misc_feature 1..2490: note = Description of Artificial Sequence: Synthetic polynucleotide
  source 1..2490: mol_type = other DNA
agagagagggagagagcagtatcccagtgtattattaactaagtcaggtaatctgatttgataaagtgtgaaattgagaactttcataagaatatcaattttttgttgcaataaggggaaattgaatatttctgtttcatattaatataaaagtctttgagagcataattgaaacaaggaggtttcatgagactactaagattttgaaattcttttattatcttgatcaaaaaatgtattaagtaaacctgtaatactcagttgtgcctaacctgataacacattattgtagtaataatattgtagttgatatttctgtatccctaatttgtggaaatacttgtaaaatcatctattaatgcatgagacgatggcatttccctgttatctatgctcatggtagaaaaataaaagcttatgactctgctagagttattatttaacaaaataattagggcttgcatttttgtttaaatttcacttattagaattacctttctaaaacctagaatcagtatgcttctgcccaatcctcttcttatatttgctgaagacttgctaacctctgtataaacatcttagaaaggcattccaagctcttctacaatctggtacccatatatattttagtttatttattcccactgaaattctagctacccagcatcttcctctttcccaaactatgcatgttaacatgccagaattttgctgtattttaaacaatcattttgaaatgcctttgagacactacatctatcatctaccttgctcatatttccccccaaaaaagaaacagtccaaggaaaaatagttgaatgcttcaatgctactcctcaactgttactctaaacttgtatttattgttatgtatttggcttccttttccacacagatgatcttgttctgattccttagaaataaagtcataagctttcttcatctctcttatttatgccagaagttcagactcaaaaaccataagatgttcaaactcaaaaaatgtattcaaaatctgattggaatgcaaaaaattccgttaaaaattattcaaaaaaatgccaaataaaatccttgaaatatttaaaattgaagtcaactgtattttttataaattcattatttcttcaacaacctaccaaagatcttaggcaaccttgagaaaagaaatgtccagggaagcggttattttcctcctgttttgttgctatgtagtgtattttattttatgtggtagggcaaaagtcacttacgtttgtgttttcttttattataattctttttaatctccagagggccttagacatctctcagacttttcattcagtgcatgtttttaataacaatcagaaactgtgacccttatctgcctgcttttttttcttgtttctttgtttaaaaaatcttctttgttcttcaagtaaattaaaacatcatctctttcaaaatcttacccaatccaataaaacctttagcctacctattactcccttctgagtacatctgtatccattaaaattagtttttactgcatatatcaaaacaaaacaaaaggtaatcttgaaatatatttcatactcataaaaaaacaacactgagaggcagatttttcctggacttaatggctcaatggtcgtcaagatgacatactcctccattttaacattttgaatgacggtttaacatggctccttttgctgattttttattgttttgcatattttaattgaattaagagggcttaaagaaatgtacaaaaaaggaaagaagatgtttactgagaaacaacatgagcagaggttgtggtctgagaggaaaacttaaagcttgtttaaatagtaaagagaggactccagtgcttgtaaagttccagaagatgggataagagatagagagagaatcagagaataaactagattaggaaaagagaatgaacagattggcatgccacataaaagggtttggactgggacttacataattatcctgttatgattaaatacattttatttaaaatattttttaccaaaaatatgatgaaaaaattaaagcactaaaagatgtgcagatttacagattaagaatttagttgtgataagaggtgatagaggcttacattagggcagaggcagtggaattaaataagcttaaatgagaacttgcatttaaaggcttactgcagaagtcatctttacttcccaacaagctattgatgttactgccacaggagagtgttatgctgcttctttaatgagaagaccacatatttatatttttatttatgaaaggataaattgtctttggctgttttagttgtattttcagtagtcttagcagttactgtgaaataaaagtttcaaaggctaaaaatgcatgaagatacaggctaaacaattataataatgagctccaacttgacctctatcaaataaaaaacatgtaaccacatgaatcaaaaaggttgaattgaaattgagcaaataaaattgt

SEQ ID NO: 40 - DNA, 2473 bp, synthetic construct
  misc_feature 1..2473: note = Description of Artificial Sequence: Synthetic polynucleotide
  source 1..2473: mol_type = other DNA
ggctcaagcccactttgatgaaagtacaagttcatcctgtattagttttgtcttccatgttagccataggcaaatgttttatcaaatactttgctatcacataccacagctcactatttatccagccttcattaggagtttaagagttttcctgtaatccagtagcccatctcaatgccagtagcccatctcaatgccagtgtgactcactctaggtgttaatgcagcactccccattctagctatgaattaatacattaatcagctattggtacaaaacgtagcactttcaaattcagtattataccacagtaagtatttatttgcaatgagaattgtcatttattctcagtaactattttcacaggggctcaattttgctggggtgattttgcttcatctatctttttttggtggagggtggggggcagtctaaagacacaaaagctctgtctttatggcagagatcaaaatctgccagaaagttgagaatgcccaaagatacctcttcaggcttacatttggagtttccttttgcttctattgactaaagcatctcatatagcaaaggccaaaatcaatgaggtatgaaaatatactctacttacagtggggcaggaaatatactatttgctgaaccatatgtaaatattcacactgcctaacttattttcatcttctcagattctcatccattttcttctttcagctattatagtgagataggtgtcttctatctttatcctgattctaacctcattctgtccttccatggataccatgtttgtcatgccacctttgttatagttttaataccttccctaccagaaacttcagatttaacccttattctcaactcacttctattttagttaaaaagttctctcttgacgctctatcacctctattctctataactggttttgactcttaaaacctaaacctaccccactacccatactctcaactattcacctccatcccccactaaatacaagcacacaaatgaggatacctgtacatatgcacaatactctatgttcctttaatttaggggtcatatatttcttataaggccagagccatgcatattacatatcatataagagtcaaaaattttaaatgaataaatcagaattgaatatgacaaagtattttgagttgaataaatgaaatgtaaagtgaagcaaacttaggtcaaatttttctttgagctttcctagttctttgtgtatgtttttcctatccactctcacagttaaattgcttgtatttcttgttaatgtctttgccatttagtaatctcactcatgtttgacttacttactttaatcagccgtgggctaaagtgcttgattaccaagcctattaagcacacttgagtgatacaactcggactaagagctcttatgagtaaaggttatacatgtggaatgggcagaaatacttgaattctgtgtcacctgattgtctgtagtttctgtgaaggtgaggtcaggactgaccttctcatcattataaacagcacatatcaaatagtaaaccccgagtgagtgggtgaatgcatgactgttcctggctgatatcctgcttccagacaatatggattaccaaacgagcgtcctctgcctctatgtgggattattatgtgtacttttcattcaggcatgaactacattcctgataatgaaacattagtactctttcaaattacatccactgtaaaattacaaaaaaaaggaaattattcatgaagttaaacaaaattgaaaatgggttataattctttttctaagaagtttttgaacagatgtttcttaactagttttaattgaatggaaatagaattctctgcagtatgtgctgtattggcaatgccaactctcattaaaataataaattcggaataaattttattagtattttgaagtaaaaatgagaaacctataagaaaaaatattataatatttgcttttaataacattataatatttatcttgtatcttgcacacagggaggtttaaaggaatacttttgtccacttatcagaaaaattaatcataacctcctctgcaataaacactttttgggtccattattggtttacaataaaatataagaaaacaatgaatgtcaggatactcccctgctgaggcaaatggtatttttccccgttcaatttccatgcacaaaattgctgatgttcttcagtaggtgttcacttattagaaaaagtcagaatcagaaactggaagttgattgaaaaatcttaagaaaaatgaaagcaagatatctttctaaatcacatcatttgataaaagtcattgcacataaaaaagcattaaggagtctctattataatacaaatcacatttctaaaagtctttcccaaaatttgtttcaaagctttcacgtccctacacacatactgattatataatgtggggactatttcaggatttaaacatagaca

SEQ ID NO: 41 - DNA, 2443 bp, synthetic construct
  misc_feature 1..2443: note = Description of Artificial Sequence: Synthetic polynucleotide
  source 1..2443: mol_type = other DNA
gtgattaactggatgtgggactaaaatatgaatgattcagggcttactttaagatttagacttggtaaatagttgcttcttagagtatattttatcttcactaactaaagcttaaggtcctggagggtggagacttttccttcccattggctgcatgctgtacagaactctcctaggtcaggttccagtgagtagttgcgaactagccatctcgggtttaacagcaaggatatatttgaaatgctgcatgtattgctttctttcctcagaaattgtacagttcaatagggctatcctggagcaaaacttaaaaatgaataggcacatgaaaggtggagagaatccagaatgtcacaaatgaatagcataagctttctttgtctatgattggaattgaaggaatgccgaatgattttggttaccttatcaatatgcattattatttattttgatatcctctgaaatcactaaacatgcaaattttggtttccacttatttaccttgtttgtgcaaacactttttcatgtaacagcaaaaagattagtaaatgattcttcaatataagcaatatttactagaaaaattaccagcatacatgagaaatgtgaattacttattttaatataatgtgactatttagagtgagctctaaattactagaggacagctttaagcagatgtttgagaatgtggtgttcagagcaacatatgatgtaccacagagaagttggtacaagagaagctgccttaactgaccacattgaaaaaacctgcaagataaattttgctctctagtctttaagtaaattatactcactaaagcctgtgacagcacaaatgcttgtggtcaacatacacatttctaatatgctcacacccttctgtttctgtaacttgagatgtttacttaatgagtcaattatatttcttaccacacgatattgattttattattaatttcttgtcttaaaaatttgatttttacactacagattaatatggttactaatattttaaagataataatcatttgtaaagaatcttgaaaattatttcgagattcatggaaacaaaagaatgtagtctctgtaggagagatggttgacacactaaattttgatttgttctcttttcacaggaaaagagctgaagcaatgcatatggcttcacagctggagaccacactcctcagcctccttacaaccaacctgtcttgtttgaatccattctcttcaagggaatgagaacaaaatttacgtgtgcagcttccaggtcagttacaatttataataaaagtgaaatctcttgttctggactgatgctttctttagactggaaagcagattttgcaatgatataattttggtcatgaagataagggcaatgtcttattagttgatagagaacaagatggagaaaaccaccctccctagaagttctcatgaggcagggttaccctgttaattatactgtttcctgatggagaaatgaacttctatcatatttaagccattgattgtattttgggattttcttcattacagcaacttagtctctatccaaaaagacgatttcttatccatcaattccattcatagaaatataacctaaataaataatcttatattgaaaaagatagtgctcatgcatacttttttctttctttgtcccaaaggaaaaataaagaaacattcataaattaaaaacaaataaagtttgtaattttcaagaggggactactccacacacaaatgagactatcacagctttgaattcttaaggaaatttgagagattttatcatgtcccagatattggacataagttatctctttatatatgcaattatcctaagaaattttccaattttatcaataagggatgttgacaaatgagcataccctgaggaaaggtatcaggaatcattccatgtggaaaaaaaaatgaaacaacaggaaatatttagagaagaaattatgtatgacttgataggtttatctaattgtttcagaacgacccagtataatataaattagactgcaaattaatcagggacagagttagggtcagtcattggaagctaaaacaaaccaaaacataacacaaatttcagctctactaaaggaatatttttctaatgtgtggagcctcacatgaatgaagagccaattatcaatgatgtccaaaggaagatgaaatagtgttcagctagagaatggcatcttaggttccttttaatcctgaaaattcataaatctttattgatattctaggcagtttttctttatcaatacaagttactaaaactttgcctaatttgaaaatcttgaatatcagtttttgtttaggtaattgttttgacttcctctatatagcaagaacacaaattctggatgacactgcttacttccaaatcctagacctaacattaggaaaagttgct

SEQ ID NO: 42 - DNA, 2412 bp, synthetic construct
  misc_feature 1..2412: note = Description of Artificial Sequence: Synthetic polynucleotide
  source 1..2412: mol_type = other DNA
aattaatctcaataatttgccgatactttattcctatattctcctatattttgttcctatataattcctatattcaaaatataggagaatgtagagaattatagaaaaataatcatgtgtttatttgaatggataaacagaagtttcgaaacattcaacatctgtttatgacaaaaagctactagtaaattagaaataaaaaggaatttcctcaatttgacaaaaagcaacaacaaaaagttatagctaacataacacttaatggtgatattgtacacttttcttatgttgggaacaaggcaagaatgtctgtgctctgcatatctattcagcactgtactggatgtcccagtctcattagttaagaattaattaggcaaaggcaagaagttaaagtcataaactggaaaataataagtctactacatttatttgtaggtgacataatcattgtctatacaacaaagaacatttaattccattctatgctttttactcagtccctagcctgcataagtagtatacaatttgcaaagttggtaagagaaccaaattagcaatatggtaatccaattcaggacaaaggacaatcatggaaatttgattagaaatgcattaatgtgttaacaagctacctttgctgtatctaaaactttaaataaatatgaatagcagcaaaaccaacacaaactatgatttataatggattataatggataaaatgtcatatagaaacattgaaatcaatttggaaatctagaaaaattgaatttttaagaaataatgggtacaaaagaaaactcacaaatgcaaaccctttgtataggtgaaattcatatttgattcaccaattagttttttttcaccatgaatatttttttatatgaaaaagacttgatgctaatgaatatacttttaatacaacaaagataaaatgagaaaaacattatttaactttggttttataataattaacttggcttaatggaattcatttggtatactttaatttggagatttaagtaaacactgactccaggaggctagagaaattaggatttttagattacagatgcaatatggagatctcatttaacaatgacggtaactttgagataaaatacgggggaagtagcccagaggcagctaaaattctccatatacagtgaggtcttatctacaaagctccccacatcaatatagtttacttacaagtaccaaattgagtttgtctgctcttctgaaagtggtgagttaagataagggtcccaacagatgaacagctgttactgcaggtgagtgttctacatcaggcacgggattttcaactcataatggagtgacgttgaaccacatacaatattatgaggattttcccttgaaaccgttaaagagctgtaacatgatgcttgtgaatgtcaccactaggtggcactgaaagttaaacagttattgaacaggctgtggaatattgaagttttcctatggaaaaaaatttgattttttatgttgtgtctatatattcttcatttgaccttaaaacatagcagtagcagacatctcttgtaccgtgccttacacctcagcccatttgttttcctccagcccttggtgaggctcttggttacagaacctcagctcagctcactgcatatccgctgcttttttgcactaagtctttattcacaatgtggttgggacacctgtgagaagctacttagcatttatgaatgctcaaaactgcaagtgtgggggaattaagacccaatgggcaatccgtgactattaggggatgggagtcagggctttgtgttcctttcatacccctcaggtggacaattctgaggcaagatcttcattgctcatcagaggattccggcgaggtcagatccagttttccatagtggcgaccagcttgatagtaccactctattgactttctctcctttcttgttttattctttccaatatattagccttagtatctgataacatgccccaaagtaaagtcatttataaagctccccacgttaatatagtttactttggctttctctcctttcctgttttagagtcggcttcctgtaagaaacccaagcataacctactaccctgataaagaacattttcagcacccagaactctccttcatggctccttttcccattcaacgctctttaaaagagaactaataatctattagttctatttttgaacttcacattactggaatcttggccagtactattttttgtttgccttcgtaatttcttttttcttttctttttttttgagacagggtctcgctctgtgcagtggtgtgatcttggctcactttagcctcaacctcccgagtagctgggattacaggtgggtgccaccatacctggctaatttttgtattttttttat

SEQ ID NO: 43 - DNA, 2388 bp, synthetic construct
  misc_feature 1..2388: note = Description of Artificial Sequence: Synthetic polynucleotide
  source 1..2388: mol_type = other DNA
gctgcacacagagcgcccctggacaccaaggcttccctggtggggaacactccctgtgtgttgtcacacatcaatgccaggagagtggcgctgtccgtgactccacgggagaggaccgtaggggctccatgtcaggcactgtcctggactctgtgctgtgtgcttcttcctttggctgattttaatctgtattccctccctataagagatcacaaccatgagtataacaaccttcagtgagttctgtcagatctcccagcgaattatcacaactcagggtggtttggggaaccccttgacttgtagttggtgtcagaagtcaggatagtgttttgtggactgtgtcccctcccacttccagttggctaaaggttcacaggccatcactgactatacaagggaggatggctcattgcaggggggctgatattttagccaatgactaaggaacacagagctgcaaagtgaggtagattgacccccttagtctcttaaagcaacacttctcaaaagctaatgttcatacaaataatgtcggaatctgataaaatgcagattctgattctacaggtccaagtgcggcctgatctacatttctgataagctgatacaacagctccttggagcacatgttgagtaagaagatcttacatcaatggtttccaaactgtgttacatgttaaaatcccctagggagtttttaattatcctcatgcccaggctacacaccatctaatggtatgaggccggtgtccctttccctgttgttgcagtgttggcaggtagagtcaatcaaagcatggagccaggtaaagctgtgctcatgattgaaaaatgcaagctaacaatagaggttgagagattgtgttttagaaggttgtgaaataagaaaaacaagactgacaaagaagcaagtagctccacgtgggattctccttgtccttggggatctcttccttagcatgtggtggctgtcatcgccactctgacacagccctagttactcagatcccttgcagcagctcagctctggaggggagcccgggctcaatggcaggagcaggcaaatgttggcccaaactcagcattgcagtgacattcttatcaggccattaagtgctgatattttactattactatatatatattttcatcactttgaatgctggattcggtagctaggaaaggacagccttagaggtcaaagggccacttgcctgaaaataaggtcctgaaagaaaaaaaaccagaagcccaaggggatgatcatgtgttatgaaaggaaactctatggagggcttttcaaaatgcctcggcatctgaacatatcctcatgggaaagaccgccccaacacgaatgtggcctccacagggtttcaagaggagtcatggaaaaggcagctggggccatttcctggggaatgggtgacttcccaccccataagtgatgtccctgcctccccatcccactgtgggcctcagaggttcaaactacctgttgcatctgcatggtgtggacatagaggcagccacactgaggagcaagcaagaaagggcatgcggataaccttgactcccagggccccagaaggcactcaccaccttcactctggccactgcaatgtggcagaactatactcccaaagccatattgtttattagaataataagaaaactatcatacattaagtgcagtaaatgtgccaggcacgggaccaagtgctttgtacccaatgtctcatctaacatggacaaaacccaataagacaggtattatattattgccctttttacagaggaagtgaagcttggagagccccaggaacttggccatagtcatgtgacaagttaaagcccggttctcaaagccaggctgccaggctccaaagccagggaaacccaattgtttctgaatgcccaggggactcaagcaactggtccaaggtcacatattgacctggagaaggagcaaggcagtgaaccccagagagaggacaagcctcctatgtgttgtggtgcctcaggacccatcaggaaatgatctggccagagagatgaccccttccaagccaagggatagattctcagaaccttgacacagctctaagaggggagtacagtgcgtaatatgataagtgccaggaacggagttgcccgcaaaggaaaatgaacactgtggcaagccctaagtttcccaacaggaaccagaggctgtaagctaagtaaagtcattcaacaagtgcccagggtgtgacggcgtaagcttaggagagactggtagccttctcagaggctacagatgccccagcagaacgcccaccaatgtttcccacatctaggatcttctcccctttgaagcatccaagacagccatcagcaggctggaga

SEQ ID NO: 44 - DNA, 2374 bp, synthetic construct
  misc_feature 1..2374: note = Description of Artificial Sequence: Synthetic polynucleotide
  source 1..2374: mol_type = other DNA
ggggagacccagaacttccagagagtgtcctggaccatgaaggtgaccaggaaagggaataggtgggtggaggccgctgcagtgaagcctcaggccccctctggtctctccagggtcatcctggatcatctgaatttccctttgaaatgagcatgcacaggttcagctgattcataatttaataccctgtggggttcatgccacagggaagctccgctgccccacagggtctgggccaggtggaagagagcagcctttttggaccactggcggtgtcctctccttcgccatctaattgaagcccatcttcccaatcaaaagcaggcgaagggccccagcttcttctaacactcactccctggccctcactggcctccctgcctctctctgcccaacttctggcattgtgcaaggtctgagacctctttggacatgaggcatgtggtcttaacctggcccttgttccagacaggtgggcggacaggtaagcagagccggtgctcccagggcaggcgagggagccatgtggtcaggcctcaggaccctgggccccaccgggagatgtgctcctgggctggaaggaagcagaagagagcagggctcgatggcagcccaggcagtcccaagatggcagccctgttgcactcggtctggaagtgcccatggccgtggtccctgtggcgctccaggccttcctagcagaggctgctgggagctggtgccatgctaggtttcacctccgcctccaccacagttcatggggctcccgggaacaccaaggaacccaacaggttcccaggcagcagctttcatgacaggagagggtccttggagaaatcccctgcagagctgtagctctagtccttcctgcgtggccttgctgtatgaagctgggcccgtcgttgcccctctgggctcaggagcccacaggtacaaggccatcaacagggcatcctctatggccccgtgtgcccagacccactctgaacctgccacctagatacccttgcaggctggaccgggtcagcagcacccccagggtcagagatcagagaaggggagcctcaggaagtccctcaccaaactggcagatgtaacggtttcgggttttgcagcgctggtcgttccagttgaaggcagctgaagcctgcagctccacgcagttgccaaacctgcaggccagggtgtggtggtcaggaggcaagagtgaagtcagggatccgggagaggcctaagccctccacccatcaggaccctgcatctcaggggctccagtgcccccacctgccgacggggctgctgggagccaggcccgtccccaagcccccagccctgctccacttctcagggaagccccttcctggggtaacagctctgcctaccccatggcagcactcagccacaccagcctgtggggatggtggggattggaatagacagcccacttgagaggtacacctgggaacccaacaaggcccagacttcctccaggcaagaggccaggggcacaggccggctgttggcaaggagggctggctgaaatcgctggagcccttggtggcctcgcagccggaccacctccaccctggccctgggcattgctgggctttgaagagcagggtggggccacgtgaccagagggttcttgctacaggatggctggtgggtctgcaggtgcagggttgtattgtgaatgagtgcaggtgggtgacagctaaggaatgctggcatcagtgtaactgatgcaggcagagggcatgcagagggaggggtgagtggatgagaattggagagatggagtcacagccaggggacactggggatggacagatggatggaggcttcctgggtccctctctcccccacggtgacgtgccttccggcttgcatctccctcaccccaccaccggcccacaccagctgtgcccacaactctctggcacctgggcaggcaccagggaaggatcagaccctcaaagggcccagccaggcagtgggatgggggggctccaccaggcaggcccaagtgagaaggaggcccaggggagggaggcaccccacacttacccgtggttgtcaggctgcccaaaggcaaaactggtgaaggcctggtgctcccctgtggcccagcggaaggagtccttggcggtcttgtaggtgagccctgggccggggtagtcaaggttggcccactcagaccctggagtctgctgccagctgcctttctggcccctcttcccagcgctggcagcccccatgtgctccctacctgggcccttcccgggaaagggggtgagcagctggccccgctctgggctccaggccctcaacacacccttgccatctgctggcagccgccatggcccagggttcc

SEQ ID NO: 45 - DNA, 2357 bp, synthetic construct
  misc_feature 1..2357: note = Description of Artificial Sequence: Synthetic polynucleotide
  source 1..2357: mol_type = other DNA
atgcacacacacaattgttgggtttgtttttctggagaaccatgacacatcatgatcaaattgttaaaaaacaaaaataaagagaatgccataaaagcagccagagataaaggacatgttatgtacagaggaacaaaaataaagaatatttttggcagaaatcacaaaaaagaagacaatggagcaacatcttttaaatgcttaaacctagagttttatacctattgaaaatacatttaaaaaataaaggcaaaataaaactttttcagccatacaaaagctgaatacatgaatctctgggagatacatattataaagagacattaaaggaagtaattcaggtagaaggaaactgagaccatatggaaatatggaccaacacaaagcaatggtaaacctcagaatggttgctatgtgggtgaaaagagtaaagctggagttggattataaaaactttgatggcaaattatattctccggagactctttctcaacatgggaaatgttttctctctcaattttacaacttccttagatgtacactgtggccctctcagggacatctattctgattttcttgatttagacagatttctgagttcacacatcattgtactctttctgagttctcattgatatagccatttctgttgttaaaattggtattgaggttttctctggaaagataaacttctcacatactggttgtggaactcagattttcttctttctgactgctggcattttcaaatatgtccttctcacttatatggcttatgaccataacgtggctatctgtgcctgagtgaccaaccttcatgagtgatcaggtcttctagcaatgggcagtagagtcttggattggaggaaaactttcttctttggctcataccatttatatttttcatttattcagctataaagcaaaggagattagccacttatggcccaagctcttttaaagctcctctgtggggatcccctatatacaaaatgatgtttttttcacaataattacattcttgttcaccctgcttcctcttactctgaccttatcctccaagcttattgtgttcactatcctacacatgaactcctcaaatgggggagcaaagtcttggccacatactgctttcatctgagtgtgctgattccctgctgtggccaggccacttcgtctacatgacttccagctccttctgaactgtaaacaaataccagaccatgtctgcttgacagcataattatatccacgttgaaacccctgatagacattctgaagaatgcagaagtggcaggagcttggagcaagttcttgtaaaagaaagcgctaaaaagtcaacaccttattatcgtagctgtgaaaataaataaacaacagagcagagtacttcaatatccaaataataaatttggacacacccctagaaaactgataattggggtaaatatttaaataaccatgaatatattaatccttaaatatgtcctgaacaattccatctttttctttctataagaaatataatatcaagcatgttttaaatgctacacatttaaaaatatctaaaattgcattccatgaaggattaaatttgagaaatattaatacatttcaactttaacgttttagtcactgagtttggttggtgacaaaaagaacatgtataatactcagggactgaattatttcatgttaatgaaacaatttattataaactataaactgtatctgatcttgttgatataaggattagtgatattcatattgtggattaaagatagatgtaaatattgtgatgcttgtcccattaaaaaaatgggttccatttctccccatgttgaataggctggccagaaactgctttgactcatagagtgtggcatttgtgatgctgtatcaattctaggcttagaggacagtcaacttccatcttggtctctagaagactggagctaccacataagtctgacttacatcccctactaaggagatcacatggaaagggtacatggagataaaaaggaggacctatctaagtctagacaggcctgagaatagagtcatgttggacccttcagactagcacagctaccagctgattaccaccatgtgaccccagttaatgccacatggaacagaaaaaattacccagctaagctcttattagattcctgaaccacaaaattgaactatacaatatattttttgctgttttaaagcagaaaagtaaaactccaaccaaccaaatcaacaaacaaaataaaacaaaaagaagagaggatgagataaaacaaaagaaatgataatagagaccatcttcagctcaagattattttatatctgccctataccat

SEQ ID NO: 46 - DNA, 2347 bp, synthetic construct
  misc_feature 1..2347: note = Description of Artificial Sequence: Synthetic polynucleotide
  source 1..2347: mol_type = other DNA
gacactatttaatccatttagatctcataaatctacgaagcatttggttggtgcacaagtaactgcagtttttgccattactttctacgacaaaacccgcaaatacttttgcaccaacctaatacaaaccaagggataagggatgcggttgctcaaggtcatacaactagtggttgggccagaatgaagctcaggaagtctggctctacactgtactctttacctccacagtctacatcccagtacttctcaaattttcatgaacatatacatttcttggagatttttgttaaaatacagtgggttctgatgcagggtctgaggctctgcatttttaacaatttcccaggcaacaacaacactgctggtttaaagactacactcctcagtaccaggcctcaggggactcctggagatacagaacaagaaggaggtctacgtaaagattttgaagtcatcactctattggtggtcattaaagctgtatgcctacactgaaaagagggctaactatgagacgggacggatacaaataactcagagaatgcccaagagtaattcagcaagatgagacacgatctattggattgaacaattaaaggtcatcttttccactggttatggtgaagtcagagccttggttatagtgaactgaagaagagaaagttaagagagatataggttatatacttttaggggcttttaaagagagtaagcaacatggggtaggagtttggaaaagggaaaagcatagtggtaaagaagaagtctgttgttgtttctttgtttataacacgatagaaaggataagcagatttataggcacaggaaacaatcctaataataaccaaaacaaataaaccgtacatagattagaaggatgtgttacggggaaaaaaataagaagaaaagaggaagcagaagaaggtaagtgaaatcagggcactggagagaaggtaggggctgcaatcttgatgatagggctgcagtgaggtgacacgggagcagactaaagggagataagagcacatcccacatgcccaagaaactgcgagaaggccaagatgcctggaatgaagtgagtagaggaggtagttaaagatgaagccagagagctcagccaatctattaaatataacaacaaattatttagaaaatgagaaaaataagttaccaaacctatcacttaaactgtgattaactcaaatccttatatctttgtttttgcctccgatggtgattgctcttcttattactatgagcactctcctcactacttttcaaagaaaccatgtaaactgtacattactatgctttgaaaattaataatattcaatctatataaataggacttactcgcagtcgtacaagaggcttctctggctggtgagaattacccagacgttcccgttcagcattttcaagcatttcttcaatctcaaaatttttaaaaagattaaaaaacaacgtagtaaactgagtttaacttggctgaatagcagcttattaccacaggaattttcctgaactacataatcatctttatttcctaggtcatttatgacaccttttcaaatataccttcttgtaatgctcctttaatactattccttaatgttttcctttcatgaaagttcttcataatttttcaatctctaaaataattcttttagaataaaacttaaaatattactactcatgtttcaataaggctttcctcagcttaccaacttaaaaccaagtaagtctagtttttgcagtcatatgatccatgggagactcaccagaagatttagggatcaataagcaaggactttagattatttatcttggaagagttcaaggtaaaagaaaataagactgatgttttcaaatatgtggagttgtctcatactctgagaggataagattataacatcttagacttgaaagagttctgaagacaaaagcacttgttctatattgttcttaagggtaaaaccaagttacaaggagacagcactagattattttcataaatggctgtgtgcacagtgattagatatctccagatggccaacttcatagctgaacaattctagttcttagaaagttcttgtattggaacaaaaactgccttcctataacttggtcctgatctcaagaacaatacagaacaagtgtttttgtcctcagatttctttcacatctaagactttataatcttgtcctttaaactgtctgtaacaatgaagtccaaaagagttttctgcaataattttttctatgtgcatattcaatatggttgccaaaaccatatgtggatatagagtacttgaaatgtggctagtacaagtgagaaactgaa

SEQ ID NO: 47 - DNA, 2282 bp, synthetic construct
  misc_feature 1..2282: note = Description of Artificial Sequence: Synthetic polynucleotide
  source 1..2282: mol_type = other DNA
acagcaaacagccttggaagatgcagcaaaaggcaggtttgtttactctttagtgtaataaagataatgtcttccttcaaggcaaaagtcaggcaagcttgcttactgcccattataaaagatttaggttccctaagctcagagttgctcttctctgatgtcaaccactgcatttgcaggcagcactcacccctctctgcattgctccatgagaactaaggcctcaacaactggcaaaaaatactgatattctgacactgttactgggtaagaactacacttcctttctgacccaggagcatcctgtttcttttacagcatcagtgaaaacatggcaggctagcatgttagtctgcaaggagaataagatctcaaatcccttatcatccttgccagtgttggtttcaataataggatgttgacagaaatagaactttttgcaagaggagggatagcagctcaacagtttttgcatgtcacatgaaaatggtatattaaagaaacagctggcctggccccagctgttaatgtaaaggtagcagctctcattggcaggaagcctgttcccttatcctcttatagatgattataataaaggcctggtctctgttgagattggctggaatgttttagctactggatcaggatatgcagattttttatggtgaattaagaatagcaacctcagcacccaaggtgagaatacttcaaaccgtagggaaatgggggagagaaggacagtaatggcctttgtcttccataattgtccttggagccttccttgcagagttaaatgccttgatggagctctcccaactgtcacctgtgcctgaaataatttgaatgccttctcccttaccctttcctgggaaatattctagaaataacaaaggtgccctaacacctgtacccccaacaaaacatttgtaaacacctttgaatgtttcctacccccattccccagccattgctcagttgatctgaggtcataaaaacaccacccttctggcagtatagcaaacagaatgggttagaccgacttccatcatgctttgctccataaatgagcagtaagctaaattatctgaactgaactgggtagcctgaggcctacaggctaagggggagatcattttggaatcactttcatcctatgccctctagctaatgaaagtcttacttgggattccaataagttgaaataattcttttcagggcactatatgcactcctggattttatttgtgtggatcccaggtattaacttgccttcttcatggaaacctggtgacttagaatcggtcataagagacctctgagtgtctcaggaaacacttccatagattagtattcctcaggtgactgcaggttggacacttctggagggataactgattcattatgtgaccctgtaggcagtcagtagtcattcagtcagaaaacatggtagacgacgtgtccctcattgtggttaaagtggctgataatattacttcagccctggaagatgttccactcagcttcattcatggagtagagttgctatgaatgataaatcttccatagccttcttccttgcagaccaaggcagagtctgcacaattattgatatgttctgctatacttacattaatgcctcaggttaaatagaaaggtcaatacagaaatttaggaagaaagccacatgggatttttagatagaccttgacaatatatagaatttgttttgctggttagatttgaggcatctggaggtatgtttgagcttaatactttctctaggttgacctgattatgctacttagagttctgttgatagtagtcttaaataaataaactatagaacatattgaatggattttgtcccagactctgctggtcagattaatcagggtagctggcagagtgtcatattcatggaaaaattggccagaattcaagaccatagaagtgagtatggatactgttggagtcaattctccatggattttcccatttctacgcatcttgtgagcaaggaactgcctgcactttgttcaaaagtatgttttcaagaatgtctgcatatttaacacttggaagatagagataataaggccaggcctgcttactgcctgttttaaaagatgtaggttctctgaactcagagtttctggcctataatgcaactcattgattattcatatatcatatggccttctttgcatctctctgtgggaatcgttgcttgggtaactgtctaaaaaatgttaatcttttggtattgctactgttgtaaataa

SEQ ID NO: 48 - DNA, 2275 bp, synthetic construct
  misc_feature 1..2275: note = Description of Artificial Sequence: Synthetic polynucleotide
  source 1..2275: mol_type = other DNA
gaagagaggaaaggatgttgaaaatgtttgtaacagaatgcttctgatgaaagaccataaaatctgagccagataggagagaataaaagataacagtacctaattaacagagataaaataggagaatgacttgacggtatcaactagaaaggaaaattgtttcaaaggcacacttgagtaaagtgagctagaaacaagggaagttaaggtaggaaagtaaggtctctagatttgttgtttaggatatagtctaatatccgggcgtgacaaaatccaggaagtgactctgggatcatatggctgaaggggggtagtggtcaaggtaataggtgtggaggtcaaagaacaaaggggtgagaacattgaatgaattatccatatgcagccctgctaccagccaatatggagactttatgcaaattagaaaatggcacccccttcctcaaaatgttttatcatcatctgccagaatctgtcaaaatctctatgcaaatcattgatggcgacacagatggagcagcctcctggacttacatagctgtaagcagcagccctatttatgtgtgtcttgaatccagcaagaatcataggtggtcatggtgaaaaggaagatgttccaggaaccccgtttggcagtgacagaaggggaataatcagaggctgttggccgtcagcaacaagaagtgggagagggtagaaagttcaatggcaagaacctcaggggaacagagcttttacaggatagagaaggagtagcggtgtagaaacaagaagagggtgcaaggagaggacaacaccctcatctcctcaaactcaggtatttgagatttgtgaaacaagcaggctctgcacagaaaggctgtggcagatggtagggtccctcaatttcctaagatttagctcaaatgttttctcctctgtgaaatatttcctgattttcccagctggaaataatttttttcttccctgaaatctctagcaactaatttgtgcctcttttatctccagatcttgttctattttaactatgtcatttcagtaggttcttacctactctagcagaaggtgtggtctttgggagtgggtctctgtctgatgcatctttgttctactataatactgtttcttcatttatttagtcatggtagaggcataataaatgttgaatgaatgaatgaatattactatttcattttgctcccaaatcttagtagaattaattatgtttttgaactagctttatctatattgcacctagaatcaatgtaaacggaatttgcagttttgcaatctgggtacaaggtaccatatgaattgtgtttaatggtaatgtctgtctttttctttctttactacaacagacttttcccttttgtagtttttgagtagcagcaagaatttcaagtattaatgataactatatttgatataattatcttttatagcttgtatttttattaaacaacaaaaatcccattttgttatttaaaatgatgattataaacaacaatcaattgtgaactgacagtttgtcttcagttcatacaatatttttgttttgtgaatttagagatctcatgtgtgactgtttcttcagtgaattcagctatatattttatattcataataatatgcttcttcccagtataacaattgaaaaaatgagattcctcactcttttgaagaccatagaatacataaataagtatttttggattcctgcgatagaggttattaattgctttatgtctaatattggtaaatgaattccttatttgattatggtagagtgtatttttatcctggaagagcaaatgaaagacaatttaaaaatttctcctttggtttcttaagacatatactctcatttctaaaagcttttaaaactcctctcgtcttatcaacaaatgatgctagaataaccggacatccacaagcaataaataaataaatctagactaagactttataccctttacaaaaattaactcaaaaggaatcgtagaccctaatgtaaaagataaaactataatatgaacctcctagaatataacatgggagaaaacctagataataacctgagtttgaagatgacattttagatacaacaccaaaggcatgatgtgtgaaagaaatcattgataagctggacttcgttaaaattaaaaacttctgctctgtgaaaaacactgtcaagagaatgagaagacaagctacagactgagagaaaaaaaaattgcaaaagagaaagctgataaaagactgtaatccaaaa

SEQ ID NO: 49 - DNA, 2271 bp, synthetic construct
  misc_feature 1..2271: note = Description of Artificial Sequence: Synthetic polynucleotide
  source 1..2271: mol_type = other DNA
gtctaagcacagttatttactttcccctttaagttttttctgtttcattttgaatttatctcactgtattaaaatttttatgcctgcctcctccaccatgagctcctcgagggcagagactttgtcttattaatttttgagtgtttatattttcttcttattctgtacatagcacagaatctggcagggattcagcgagacttgcctcgtcaatatgtgtgtgttaacacagatacttttgcaatataagggatgagttcagagagtagacaatttccaaatcacgaaggactgcctcaaaaggaggtggaactttatcctgtggtcagcggggaccctaacagcagagtagaccacggttacattgtgtttttaaaaaataacttgagcaacaatttgaataggagggagactaggtaggagataattacgatagcaaggaaagatgatgagagactgaattgaggcagtgacagtggtaatgaagaagatagaacagagctacagattcttcagaaggtacggtgtcaaatcctgaattattatttggacgttgaaaataaacaagaagaatgaattggtgaataaatcctacttctaacttgggagctgctggtactcttcagccagatgtgaaattcaagaaagggagcaattttagggattaagttggttgctatggagtctgcaggtgtgaatcactgtgaatcctgaaaatcactatggagctgtgtcaaacaccacccagttgcaatggaatataggcttcgtagaataccaaggtggcaatgtcaaggcatgtgattccagcttaattgttttcccttacagacacaccttgccttaaatataaagcttctatttctgtgtctggatgttcagttatttccaaatattgtcctggcccttccttcagcatgctggagatctgaagccctgcatatagccaccaagaggtacacttacttctacttcctggcagaaggtagcattgggtccatattgtagctggcactggtggtgaacatcatagatcactccgggggcaatgaccttggacttcaagcctttctttttaggtatgtcatcaagacagaacccccagcctcggctgaaaacaagttaacagaaatgagaggagttgtttaggattccctttaccttcagcctttcattcaacagaaacttccctctggtttactctttgtcctttaagacaactttattttttacaaggcagagaactctctaggcccatcatgggagttattaaagaaaatgcaaatcatatcccacaacataagcttagtttatctagaaaatacaagccatggtaaaattagaaaatcattatcctactctcaatgaggtttgaatgaccactcttatctctgttgggtgttcctgccagttcccaaggacttaattcataattggctcatagaaagctattttggggcaggagcaatctgggatgggacaggatgctcacctgcctgtgacaagagggcagagcccatctagacctcaggatcagaatgcagaagtgaaatccgccccttctgatgccaccctgacatggtggcctgtgggatggaatccagccttttccaggcatcagcttctctgtgtaaaactcaatgcagcttccaatttaaagagacccaggtgagggcgtcatgagacactgtcacttactccaagaagcgggtgatgtactcctcgctgcacttggaccatgtcagcggagtgggatcgtactggagctggcgggacatgatgtacggatgtctgcccacaggctcacagtcattttctttcccatcatgctggatgccgaagctggcagggaagaaccaagcacaagaagagccagcaggcaggcattaaacaggaagaaaaaccatagtttccctaagagcgtaataactcacagacagccacgtttgtacagaaggcaactgtttgcaaagtgagactttgaagtcggaggggcatagctaattttcaaatgaaaaaggacagggagcattgtaggcatgctttacctcaaatatgcatccatgggagtcatgcagctaattcagaaacttctgcttggcagaaggctaagagctctgtctggctttctttctatgaatcaggagtcaggaaggcaaatcctgcccccagctatttgctttctcctgctgcagcaaccacagtgcacagcacaaaagaacaaaaccttccttctcccttttcatcagaatttaagagacagcatgaaag

SEQ ID NO: 50 - DNA, 2235 bp, synthetic construct
  misc_feature 1..2235: note = Description of Artificial Sequence: Synthetic polynucleotide
  source 1..2235: mol_type = other DNA
gcgctctgtgtgcagctggcccaggcaccgggctcagatctaacacatacgctctgtgagagcagtgggtgatggagcttgccccatctcatctctcaaatgagaatgctaaggctcagagccatcacattacccagccaggggccctggctaggcattcagattccaaatctgggctctcacctgcacaaaggcatacgctaggttagaggggtagatcaggctcaggaggggtcactgcctgctgtgtgcgtgcatctgtgtggtcctaacactgcttcagtgctagagcagacgtgctaatagaggcctaagtgggccgtgtctatgtgttcctagggcttcccagctgtgctcaagaggccaaggtcactgccccatgcccactgagcctctggctccctgacttttttctcatcccagaataggagaatggggccaagcccctcctgaaggcagatggggatcaaggttgggggcactcaccagggacccctaagcattgagtcagaagcagcaggagtgggagccaccccatccttctggctggaggctgcactgtgacccaccacagccccatccgggaagttgcaaaacctgtccctacgggattgggtggctctggctccgcacgtcagctcagggcctgctggaccctgacctgagacctggtgacaggagccatgaggggccaggcctcaggtcccacaggtcagttgcaagggcctagcacagctagccccctgagaggcctccctacttagtggtcaggtgttaggaaggtttggtggggacacttgaggtgccctggggttggggtgaaacccctctgcagcctagtcagcccaagggcatagtgaaagtgacagctgccagaggtctgggttccagcccctggctgacattaaacttttctgaatttcggtttttccctgtaaattggggaaaattacttgccccagcttcaacactgcctcccctccactcttttgctgctgccttatcaggccccagctgtaggcaggtcagcccacgcccggcggcagagcccagagaggctcgctcatctcagccgccagaagtgtcatcccagggaaggtgagcgaagctgtccactaggactaaataggggtggaggtaacaggtagcagggactctggcaggaaccgcctttcagacgttttcaggaccgtctgagcggggcctccaagtatgggtaggagacaggcggcctagggattccggttagcacgtcgcgttctgccgcagcagggctgggagcatccccagggcaggcggaggtcggaggtggtgaggcctttcggcgaagctgaggcctggaacaacccggtgggaagccacggagggggtcccctcgcggaggctgggcgcgggccggtgcgcgtgcgcggctggaggctcagcgcgcgagcgtgcgcgtgatttggccctgaacggacgccgtagccgagaggttgggcggatgttgtgaaccgggtcgcggcggccgaggctcggggtgagtgaggggcggcagggctctgagcctggcgggttccggctattcccttcgcggtccagtttagtccagtgcgagggcacctgcagcgccgggatctgagtgcgaaactccgagcggaagctggtctggcaggtcctctggagcttggggccaggcgggggcgacttgggggagccatccttgggctcccagacggagtaggttcagttctgagcccggataccccggcgaggttggacgggatagccgtgacggggagtccccgggcggggacaaggtccgcctctcacctgggtcctcagcaactgacaccaggagtgggtgtctggaaggtctgctcatcaaatgaatgactgcatttaatcagatcttcaactactctggtagtgaaggggcaccgatcatggaggcccaccgagggcccgaggtccggaaaatcaccttcccgaggagcaggcgtggtgcagacccacaggggtttgtggcgggagtagagggtctgtttggggcgagataagagactgaacggcagagtagggagtgctggctaaggcagtgctgcagagcgaaactctagacctgcgctgtctaatagaactttatatgatggtgggaatgttctacctttgtgctgtccaatagagtaaccgttagccacatgtggtcattgaactcttgaaatgtggctgaggcaactgagaaatcgaattgtt

SEQ ID NO: 51 - DNA, 2220 bp, synthetic construct
  misc_feature 1..2220: note = Description of Artificial Sequence: Synthetic polynucleotide
  source 1..2220: mol_type = other DNA
ggaaactaaccaacacagcctttcagccctcatcaaaggtgatgcaacttattcttcctacaattaataatcattacagggctttaggaagtaagcatttttaaaagattactctagttgttgagtgaagaacggacccacatcagctgcacctctttctccaactcctcaccacagccacagagcacagccactgccacacacaccccacagaagtggttgtcatggtcctgcagagaggaagatctaagatttccctgaaccatcctattatcccccatgctctttttatatcccaaaatgagaggcatgggactctaagtcctgccaacactcaactcaggaaggtcgttcatgtgctcttccataaaaaccaggagggccagcaaagcctggtgctttccagctctttcctgagaagttacactcaatttgtccctttaatgaggtttttccacagcagcacagaaccagtctcctgctgagttattggtcagggaacacaaagccaattccaccctggtctcctatttctggcaagaccatcctggggctatttctcaaagcagctggtccttctagatgctagccctctgtgtgcacacttatatctcataatggatggtgacctatcagatgcctttgggtcctccagagcagctgaccagtgccaagtacataggaggagctcaattcatacattctgaatgaatgaagaaatgtagactatctgaatccataggtgaaaataaaatccacggggtaaaaaggtttctagctctgtttctggctggaaagtgcatgaaagctgagtttaatcaataaataagagttgtagctactaaattcctctccacctggccccagcaaaggatacatttacatctcattccccaaatgtaggacatccaaagaccagaggtcccatgagacgccacttcttcaaatgccgacattttgaagaaaacacaccaagatatttccaaagccctgaccacatacgtggtcagggaaaatgcttaaagcttcagctcctttcagaaaagcaaaaatcaaaccagacttatagcactatcggccagtaatggttaagctcacatgatgtgcaaggcattcactgggctaggagggagaaataaagaaatagccctgtctgcaaggagcagatgatctcaatatcattataaggcccaaataaatgaattatggtcttagacaagtcaacggctccccacaagatgaaagcacaaggtcacactcaatgaaatagagatgaactgaattcttgtgaggacataggacttcgaaaaggaatggcatcatgagctgggctggctggagacagatttaagctttgaaaactgtggtcaagcagaaaagagataagaggacatacggagagaagtaaaaaggggaagtagaagaagcggcccctgagattccagggaacttggttccaaatggtaggacaagtgggccagcggcaataaaattagagcaaagtgtccttccagcagctggggacaggaagctcgaggatagacactgacctatgccaggaaaggcctggaagttatgtccagggaagaagaaaaataaataaataacaccttgcaaacacgaggggacagtttgtattttaaagtcttggaaaagtaaatcaaagtaaacaggaaccttggagccatcaggttactgttggaaagctgatgggagatgccgtaagagaaatgggttcctattctccagtgcatttcaactggccatattctcagcagtgaatgatggaggcagagctcagagaagcacgtctgaacacgtaaggaccgagaggcgagtcttcagtgaaacacccacagagagccgtttgccccttgagattcctgaggagtgtggagagcaaagaagcaaacccaatgagtcacagtgtaaattattcctattagtcagtgctatcttataagcacacatacacataaagcacttctgctgcagactgaagtatgatggttgtctcaagagaaagagcttatacaatcgaggtggacaatgaactacgtacttttttcatgaaacactattttcacttaaaagaacaactaataaactatggttattcagacttagatatttcttgacatgttcttgagaaattaatgaagtgagcttgtcacttaaaggaaaacaactgacagtatttgctgacactggtaaaactca

SEQ ID NO: 52 - DNA, 2201 bp, synthetic construct
  misc_feature 1..2201: note = Description of Artificial Sequence: Synthetic polynucleotide
  source 1..2201: mol_type = other DNA
cttatccttactaaagcccactgtagcttaggatgaagttgccttctgcaatggtaatttcactatcctgtcagagtttcctggttctaaggcctttgcatttgagacatggtatcacactataaatcaggacacattttcatgtgccagggagtgtgcccaacttgtaaagaataaagaaccacatcctttacatgtcaccatgtgtgtttttacagacatgccaggcctcaggcacattcctctgtcttgtatgagatttataacagcaaacttcatgtaaacacacaggagtaaggtcatgcaaatatattcatcttttcattcaacaaatatttcattcaataagtatttactgcttgtcatgcaccagaaacttttccagggaagcagtgaacgggagagcaaaacggtgaacaatttgcgtctcctgagtacttccattttagggtgtttgtgtatgtgtgtgtgtgcacacgcatggatgtgtgcaggggatggtaggggatggtgggtggtggtggagcgaattatctaggcagagtggataacaagaatctgcactcagtgctaagtggggaaataaagccaacaaggggcagagagagggcgagcagggctgatgggcttttcaggggagtcttaatgagggcccttccagccaagactgggacatgagggcatgtctggtggaagagcacccgggcagagtggtagagtgaggagcggggcagagtccccagcacccctggtgcagttgaggaacagcagggaggctggtgagactagagtatgggcatggggttagagagcagggcccaagtgggtgtggggcctcttccagagccacggaaggatctttgcttttgctgagcgagcggggagcacttggggcaatggggcaatgggaagagctaggcagaggcaggagaatagctaggacaggtgggtgaggtctgcagggcagggcagggcagggcagtggagggggggatgtaattggattcaggatatagtttgaacacagaaccaacaggattttctccttggatcaaagatactgagtgtgataaagaggcatcaaagatgactgggagattcctggcctgttctctagaagaatgggactgctgtttctgagagtggaaaccctttgggagggtttgcttctggccaaatgagcacaccagacccctgagtggaggtggaggtgggcagtgaggatagtgattgagtcccgagttaggcatgatggtgtttgcagcctggggttggatgagatcttggagggaatggggagagttggggaaaaaatgaggtttaaggtttagccctttctattgggctccaaggagtttcaagaccttagactcattgctgagcctcttgagaatctctgcttctgtttgtaagagaggataacagcagccaccccacctcgcagggatactattatgattactgaggtgatgaatgcatggaagctgcttacatgagttcccagttctgtctctcctctcctagcaagagagaggcaacagggtccacagagctactccaaagccatctgattgcaaacagcctctaaaagaagtctgggaaaattaccagggagatgtttcccaccagctctgctgcttccctttcaaaccttgcgtttggccactctctagaggttggtccctttcgcccatctttcagagactttcctttgctggtttcctacacaccccctccccctttccaaaacctagctgggtttctgctccagttttgcaaacaccattctcacctaggtgccaagataaactggccggaggttactgttgatggtgctagtgggtatttggttaactttctcaatcaactggaggtcacagggcccaccccgaaaagtagctgccctaagaacctgctcttctccatcagtgggtgggtggtggggagggggtgggagatgagaaaccaggaagcagagatttctgagaggatctagaaaaagagagatcatctacactctgtcaggcggttttcatgcataactgataaaaccatgctgttcttgaaattaagataatggcactaaataagagcacatgtagactaaatatactaaatatacgattgtctcatcctgatcaacctgatagacctaacaataggttcagcacagtgagaaggatgatagtgtgcttggtctt

SEQ ID NO: 53 - DNA, 2182 bp, synthetic construct
  misc_feature 1..2182: note = Description of Artificial Sequence: Synthetic polynucleotide
  source 1..2182: mol_type = other DNA
ggctaacatgagaggattgcttgaagccaggagtttgaaaccagcctgggcaacatagcaagactctgtctctaaaaagaaacaaacaaaaatatcttttcaataggcagagctgtccaagacctgggtgcattctgtggttaagactgaattccccatcactgaaggcactcaagcagagactggatatccactgccctgaaccaacaatgctgtaagcatctttctgtctgttcttccatcatcatattttccccaaccctcttcttctgcctgtcccccttccacatttaaggatgcttgtgatgactttgagccaccagataatcaaagacaatctccctagtttaaggtcaactgattaacaaccttaattccacctgtaccctaattacctctttgtcatgtgagagaacacattcccaggttccagggattagagtgtggacattactctgccagccacagcaagtgctccatgtgcagtgctcacattgttgtgattcacagcatgtgaaccaaaggcatctagtccttgtgtagctgtcaagtcccctccactatctgctcagggcagggcatgcagtaacaggtgaccggggcacagtgcctacgggcccagcttcatctgtcacccctagggtgtttattatggctaaggtagggctgaggagcatttgcctcctgtcactctaggacccccgtataaggcatgtggaaggacagagcacacacgtgccctggagagcagcatcaggaacttgcatctactgaagacgctgcatatgggagcagagcctaggagaatctgtgcagatgcatgagggactcgctttcaggacagatgttctgagtgcatgaaactgcagccataacttcttgcccttagacaaaagggcatgattagaaaaatacaacatgttcaagaggtttcaagtagaacaactttgaaagatcagggtaaggttctggcacatgcgcctgacccagggactgcacctgttgcctttccataagctccctcatcaatcctcaaggaaacctcatcaggaagacttcttttggtccctgcctttcagaggatcaaaatgaccctcaaaatggctacaattactgagcaaataagtgatcaaagctggagtcatattcaggtcccacggtttggaagtctttgtttttcacaacacacttcattgcctagggcagagaacgccatgtcttttgtgcagtatcttcaagcccatccagcaggtggagacgaggaggggtcctgggatattcaagtttctcactccacagctaagaccgtctcccatactgcactgatcttagggaattacctctcaatagcactaccactttaactcctgttcagtgcagaaaatttgaaaaatatagaaaaacaggaaaaaattaaaattacctagaattagacattatcatcatttgaggtatcatatagatatgtattgctttttgataaagtaaaatttttctgctcataagttttttatggcttatttttcactttatagaccatagacactttcctgtatcattatctcttcttccatcgtatccattttatagctgtatgtggatatagcgcaatttattaaaacaccctctattgttggacaattagatttttgtgggtttttttttcatattatgattttgcaataaaatcctggtagataaaactgcacatataattgagagtttccacaagacacatttctagaaatagaatgggccggccaaagcatatgaacattgttaaggtccttgttgcagactaacaaaaggcctaccgatgctccccttggctgtgtatgaaagtgtcccttcccccacaaccacagtaatgctgaattttatcttttttaaaaaaatctttgcttctgtaggcttcttggttttaaggggtcccgtctggcattgcatggattaaacagaagtatatgtgcaatggtcctcttctcctaggatttaactcaaaaatcagcaaattttctgtaaggaccagacagtatatattttaggctttgcaggccattagatctctttcccaattactcaactttgccaatgtagcatgaaagaagctatagataatccatacacaaatgaacatttgtgtgttctaaaaccagtttatttactgcgctctgtgtgcagc

SEQ ID NO: 54 - DNA, 2174 bp, synthetic construct
  misc_feature 1..2174: note = Description of Artificial Sequence: Synthetic polynucleotide
  source 1..2174: mol_type = other DNA
aggctgaggcagaagaaccgcatgaatcccggaagtggaggttgcagtgagccgagatcgcgccactgcactctagcctgggtgacaaagcgagactccatctcaaaaaacaaaaaagttatcctgggcaacaggcatgaaactctcaattttttccaagaaaactgtgacatatattcatgcttatatggaattaagagagtcaagacattttttcccattgagatgacttcttgtggaaaatcaaagatatttattgagccctttcacattcagttttgaaacaatcttgaaataattcctattcatgtcatttgcataattccacacatggaccacctgctttatgagtttgccatgtatgtagaggacatttccaccagctcggtattcctcatggggctcccagttcctcacctgcatcctaggacaattctgcccaggaatttattcttctgggtcctttgtctctgcagccatacttctgaaaccacagctgctgggcctctctgagccttcttcatgtgatggcagaggcaggcctagtcgtagctgcagaaacaaaggtgaaggaccccctgaagctggctggtgggtaaggagcagtggctcgggctttgttgctggtatggatttctcctgtttgctgtggaatacaatttagggaagtaatgagggagccctgtcgtgttcaccacacacaggctccatcagtgcaaaatttcactcggcagatgaacacagacagatgcacattttcttcaccaatgaaatattaaacatgacaggtgtgttactcatcgggaaacgctgcatgcaaaatgcatgtgtaacccacgaggtcttcctcatttcatccctcctgcttggctagggttctaggagatgatattcctcctgcaacgatgttcaggtatccaattccaaaagttacggtcaatggtatctttgggaagatcatttaaaggcttttggctttaaattaaggatccattaagataataaaatgttgtcttcgactttattgttattctgcctaagggatctgtgggagaacacaggattaaaaactatggagagaaagattcccatcactatggaaacagattcatttatttttataggctgatttctaattcctctccctgggcaaagctcccactaacttctgatgctaggagatgatgcttattcaacagatattttgttgcttggggttgcttttcctgtttatttggagagaagggtggtaggagaggagggctcagtaaagaggcaagctgtataagaatatcttttcaatggtttgacttaaatcagagtagccaactgattggagtgagaaggccatatttagaactcactaccaatataggaaaaggaaaccccttaagtgttactagcttgacatcaactcttaaaaaatgcaaaatacagagagagcaggttcaagaagcataactcctgaataaaattctgtctgttgactatgttcagcctagaacctcataactatatatagagaacatcacaaagggtagcattctttaggaaccacaataggtttccagtcaactatttttaactactcatttcttactgtttttgaagtttatattacccaatgggatgccaaattctctctcttacaagcagggatcttgtggataaggaacagctcttacttcccctattagcaacttccaagaacaaatgaggattgtaattgatacctgctgctatgctgttgcactctcagcctgagaagtgctagggatataaatagcagcttgatgatttaactcagtctggtttaagagatcatgtgttgctgttactttgcatgaaaatgacatcatgcctggtattcaatgtgctgtgcaatccaacaaactgaggatggccaatcacagatctctgtatcagaatttggtcaaagctctggaatgcaggatgaaacagtgcatgcagaactggtagaaagatcagtggagcaattcatccatcaagtctgaccaaacagctgccactcccctttcaggcaactcagacattagccatcagtcctggaaagccataggagcaaagccagttaaatcatgattcagcaaattgaaattcaagtaaagtgcaatgcagcagcgtgtttgcgcacgtgtgtgggtgtacgtata

SEQ ID NO: 55 - DNA, 2143 bp, synthetic construct
  misc_feature 1..2143: note = Description of Artificial Sequence: Synthetic polynucleotide
  source 1..2143: mol_type = other DNA
ggtttaggagagtaaatatacaaaaatgaaaacaaagggaaatgctatgtggttgtcgtgaataaccacatttcctggaggatttggacatgttttattgtctgatatcctttttttcctcttgtgttttttctggccactgtgtattttgcccgggttctgtaatctcagtgaggggtcctgccacactcaagctgcataaagatgcccacaaaacatgtaagctctaggcccacaaggaacccagcctagaggatatcaaacctctctgtgttctgtggtgtctgatttgcctgcttagtaaagtagcagaacttcaagaaatgcagtcatgtcagaagatgagaaagaagatgataagtggcctaaatcctgcatttttgggaaaagaagctgctggcttatccttttcaatcttccatatgagagaaaaaaagtcaaaaggaaggctgataataagcttaggaaatgttgaccacaaactccatagaaattcatcagggaaagatgaaacagatgttttacaagtgaagtgtgaaactggacctcagccctccctccttaactacctgctcccaaagcaggttcaccaggagtggtggatgtgggtgatctcctctggctggtctgactgtttgacctccatccactgctcttcccttagagagagttgccctctagggccttctcctcagctcctcccaagaactctgcccaccgccctcccacctcattcctcggcctgacgcatcaccttcttctcaccacattgagttccatctgcagcagcgtccagcttagagcgacaaaagcccttcacggagcaccacagtgtctggcagacgttctagaaaacaaattgcacttcttttgtattttcaaaacctgccacaaagcatttctatagttacagtaaaatatgcacactcatccacacactcacaataaatgccactgttgttagtgactaagagtgacagaaagcaatcattagagttttcagttcaagcttaacttggactttgtcatcattcataaacaatggtctatagatcatactaggtaatatggaaatgagggataaaacctattttctaagggttgagatggtcatttctatatgtttggcacaatatccagccctcattgctcttgggaaaggtaactggtgatcatctatgaaaggtaaatctaaactgtggctggaaggcaacctgattactaacagttgggggtggttataacttgagcctgctcagtgaagaaaatggaaactcttccatctagaaagcctcagcttgttcacttattaccttaagtagtcagctggtttcagtttccaggaagagagctgcatattccttcttatttctacccttatggggataaaggaaggttggcaggattctcagatgccatctgaaatggcttagctgcttccatctatctatcagtatttttttctgtctattcatcttccatagttctatccacttattgtgttctacactgcatgtgttttttcattatatgacttgatattttaagccattttagaaaattatcaatctttctctctctaaattttgcctctcctttctctccttttggaacccgtaattgttgttgatggaccttcttattctgtactttgtgtttcaacctcactttcatattcctcatctctcaatcttgttgtatatgaaaaccgaagaaactttctcctccatcacacacccctaagaagcacccaagtgggaagggaagtaattttctcagctctaaattccatttgattgattttcttttcaaccatgtcaagtctgctgtttaatccatccactgaatttttaagtcaataaccacaccttccatttccagaagttatatttattcttcctcatatctgccttacatatatcttctggttcttttttctcatgtacagttcattcttatatatttattttattatccctatataaaaattcaatttttgaaagttcttaagggcttgttaagggcttcttaagggcttcagctcacttagctgaagatagactacattagatttttgaattagaggctgaattatgaactcatctgaagggtggcttttttttttttgacagagtctcactct

SEQ ID NO: 56 - DNA, 2136 bp, synthetic construct
  misc_feature 1..2136: note = Description of Artificial Sequence: Synthetic polynucleotide
  source 1..2136: mol_type = other DNA
agcagcaatttcagaatttgtacaagggaccacgccttcagttttgtctcttcagaacacaccatctgtggcccaggctctctgggggacctagcacatcagaaaattccagagaagactccacttagtgtacaaacattctaaagataatttctctcatcactaaattctcgcagggtctctgtggtctaaacataaaggctggacagatttgaataccatccatccatcctttcattattcattcaacaaataccaaaggcccacttgcaccaggaagaccaggaagtgatagacagacattaggcacaccaagggttactcatgacttcggaagggctcaacatttaaaaagaatatagactgaaacacacacagtcataaaatggtgtcatgtgcactttcacagagagaggaaaaaggtgatgggatttcgacggggtgaagacatttcggctagaaagaggcaacacaggttgggattcattataagagctgcagaatcaggcatgagactgagctcctgcgtggttcctttttagctgtatgatgagggcaagtgactaaccatccaatgcctcagcttccttatctgtaaaatgaagataagagcaggaaccacctcctaaggtgctatggcgtgacagaaactcacagcactcggctgtacgtgttccatgctcgtgaactgtcattgtaagtttcatccttgctgcctggccccatgactcccaaggcagagagctggacctgctgtctcaaggtgtctccagagtggggtctcttttgattttctccattttccacttttgggtctggtttattttatgtggattacactgggaacgtaagaaaggaaatggaaggtgcatggctaggtacacgctgatcccctcataaatgtcctctgacggggagggctgaagccccacagagcaggagggtcagcaaagggtggaaagcacctgagttttcatttcccatttgtggactcttacaaatcagcaggaactgctgggaggctgggctcttaatggcacagcggcctcctgagctggggcgggcaggactgcaggaccgtgaacaggcaggcaggtcctcctgaagggatgggtggtacctgaaggggtcccaaagggagatgtaagatcttggtgccagcccagtctgcctgctggactgggccacttcttttgctggatctgttccctgtctcaacatgagaactcctgcctgggacccacaggaccattatgaaactaggagagtatgaaaaaatgcttgcggtgccggcacagatagagtaagcccaggcaagctccaacaagcaatggccgaggcccctggcaagaaggcggcaacagctggctcggggaaggaagataaacctggagaaagacaggcatcatgagcttactggggtttttgccttttttatctcccaggactgagcacaaaagctctagaagaaaccccctctctctagacagaagactgagaagccaggctcctgtgagctggcagtttgaggggaatccccgatttttacttgttttctcttttttctctcctggtcctgcctctcaaagcagtgtcagttgctgagctgtgttgccacggttgcgatggcagcagtgacagttccgctggccagaggaagccagggaagggccccatggtctgaagagtgtgggggctcccttgatctcttccattttctctcactgctttgcctgcagggtgccctggcagtgcagacctctgcagcagcacatgaggatgcagcgggcagaaacgcaggctttgcagccagagggttacacagaaaggcccatgggagctagacagtgtcaggggaacccagagggaggaagctggagaagggaaccccctaagtttgtggtgtgaacctgtacatattttgggctcaccccaaactgcatgcacaaaagagattcaaaggagcacagtaaaggctctgataactgaactatggtgcaaacccctgccatgtcgagactaacccctgaggggtgcacctgcaagacacacccaaacgacatgcaaccactgcttatagaaggtgacagagaattttcagaccagacccaaactgccacgcgctctgtgtgcagc

SEQ ID NO: 57 - DNA, 2132 bp, synthetic construct
  misc_feature 1..2132: note = Description of Artificial Sequence: Synthetic polynucleotide
  source 1..2132: mol_type = other DNA
gcgctctgtgtgcagccgggtaaaatcacagtagggagacctggcaaatactgtctcatcaaggcgatggaagttatcatcagcaattagtcatattgatagtgtgcattcttgacctgctgtacttagaatgacactgcatttctgtgttttttctcccaaaactcatgactccaggatagccatgagaaagatattgatcaaacccaaattgagtgacattctgcaaaaactttgatcagtgctccttaaaactgttaggtcatcaataacaaggaaacttgttgtttctgagaaactgtcacagatcagaggaggctagggagatactgactcaatgtaacctggaccataaaaaaatatcattgaggaaaaaaattgatgacacctgaataaactgttaggttgatattatgatgacatctgaataaactgttaagttaatagtaacgtaccaatgttgatttcttacttgtgacaaaggggtcctggtggcatagaacaataacagtaggggaaactgtgtagggctatatataaatactttgtacaaacgttgccacttttctgtaaatttaaaacacttctaaaataaaaaagtgttcttaaaataaaataaatacagttacatgagtcacagggaaatgtactaaatgcaaataaaagaatgtaatttgaaagtgtcagaaagtagtggttgaatatatttgaatttctcttgttctccttgtgctcctaggggagcaattctttgaggtttaattgcctttaaacacttatgaattgtatatttaaagactattgcatatcagattttatgccacagaaacattttattgagtaaaattgcttattctattaaaattaaatcattttatggatgatatttttcaaaatctttttggagataaaaggaaaattcaaaaagcaatgatgatgtgttattccaaaaaaagtacctgtgatttttgtttcaaaatatcaggtgctaattttcatcatattttaaatttcatttgaatattactcttctattgtaaacttgtgctgaattcctgttgcatttttttctaggagagggaaaaggaagagttagctttgggataggagatcaacactgtcttacatacttaaagactctgcttaatgacatcctgagagtcatcaagaaggcttgatagagataaccaagatttatatatttgatttagttacattcaatgtaaaattatcttgctcttctgaggcattgagtctagacacttctcataatagaaaaatccttattactctattagacatgaattactttagacagttttttccaaagttccattatcagtgttgttgctaactgactgcattagtctaaggatgctaattgctataatgtaatctccaagcttttatggctaaatataataatgatttatatctcattcaggtcacagccagtgcaggtcattgggggcagaaggtttgctccatgtatcatcaagagtgaggcttctcccacctagtggttctgcccactattacactggcaaaaatagacacatgggagagaccaggagtgtttgtccaggcctccattgcagagtccaggggtatgctggtaagtgtttaataatcagcagtcagggaggaaaaatttttaaagccttgatttgtagcaattgcaaatttccatggtgcgtatatatctcccatggtctatcagaagctattcacaaaatatcagggaacatgaaactgggaaaagaggtgcatgttcagcacaagccactttgagttggctccaacccaccaccaaatagtccctcccttctgcaaatagacactgaggagaaatttggattaaagcttctcacattacacatgtattgttgttgtatgggatggttgccataatcagttctgaagacagtactttgcataagtttagactaaggtgctgtttatatcatatctgtgtgactcatgtcccaatctgcatagcagtctgtggcagatctactatggaataatgctgcttgatcaaatacaaaaagagcaaaaagaggaaaaaagaaagagaaaaaatgttttctttcctcatgaagtaataacatctaaggctgcacacagagcgc

SEQ ID NO: 58 - DNA, 2117 bp, synthetic construct
  misc_feature 1..2117: note = Description of Artificial Sequence: Synthetic polynucleotide
  source 1..2117: mol_type = other DNA
ggggatatgctagcagctggggtgcatgccatgtttgcttcttagtcctggttgtgagattccatcctccactcaagcccaggcttcataagctggtgctcaagtttttctaatgcctggaatagcaccactggttccctggaccatacagagtttgttaacagctaggatcaagaaaaatgtcttactgtagctgcttaggtttcagggcatgagccagccactcactaagttagattcagggttgaaagagtcaagttgcattctggtggctggattttacaattccccaggggaaaagtggactgcagaaagacactcactcaccctctctcatagtggggattcactctcagttcctggtctatcatggtcatataagctgcctgtttttttttttccccttctttctcaattttggagattcctttggcttttctgttgaattcctatgttccctcttggataatatattcaaagtgtgattgcctaccaaccattttcattcttctaaaaggatgaggcatgctagaaatgcttctaggcagccatcttgggaaaatttttaaaaaattgctgttttactttgtttcttttgttgtgtagtgcttccctgattggtgctaatctttgtggctgtgtgctggtgtctgtggatttgaagaagtccctattctatctttgcagactggctttgcatgggaaagcccttaattagtcagactgtctggaaattctggggctgccatctggcctggtccatggatgggcttgctgctggagttcaggcaggttgacctggtgcctagggcagcagcttggtgggcctggtgcgtattccacaggattgggtctggagcctggatccactgtggtggtactggtttgcaggggagggcctgaagcctgtattcatgagggctgtctttaaacctgtcaggcatgggctgacctggcacttgagtaggccttaaacctgagtctgcaaggatcagccgggcattgagattgacctggagcctgagtccatggggcctggcctggcatggtactgtggtatgctggagactgagtccatgaatgtgagcctagttccttggtctgtggggaaaaagactaacctaaaacctgggtcttcctgggtatacctggatcctaagtgcttgggacaagactggctccagggtctattgaagttggcctggacttttggtttgctgaagcaggcccactggcacctggggccatggggatcaacctgaagcctctggctggcctggtgctgaggcaggtgtaaagcctgggtctgcagtactggtatggagcttgaagttactgctgctggttggcctgatgcccagagccatgggggctggcctggggccctggggccattgggataagcctagaagcttgttgtgtgggtgctggtctgaaggctaggtacacaagggctaccctgggtcctagggctatgggaacagacctggaacatgagtctacatgggcagtcctgcatcctgtgtccataggggctgaaccagcactggagtctactgagatgggcctagctccagagtctgctggaggttggagctataggggccagcctcaagagtggtgctgcagggtctcacatgacactgggcaggcctggagtctgtgtgcatgagtgtcagcctcatgcttgaggtcagtgatgccaacctggtgctggggtagacatgaagtctggggctatgtgagttaatataactctggactggtctggaacctgggttggtcttggagtctggggctacagggcttgtcctggtgctaggtgggcctggagtctgtatcggcagaggctggcctgaaggctgagtctccaggttctgctagggctgagtgggtgggactagtgtggagtgggcctgaagtctggggccatggaagccagcctggtgctggggacaatctggagcctggggttttgtctggcagtatgtcaggccctaagaccaagtctgccaggcatgtgtgaagctcagggctgtgggatctggcctggcaccagggtaagcatagaggctcagtctacaattacagcctgaagtattgggccttgggtttgg

SEQ ID NO: 59 - DNA, 2111 bp, synthetic construct
  misc_feature 1..2111: note = Description of Artificial Sequence: Synthetic polynucleotide
  source 1..2111: mol_type = other DNA
atatcatctatcacctatcgatctattatctatccatctatctatcaatcatctatctatatctttctaatatttttagatagatagctgtcttttccttataactgaaaaccgagctgttcgagttagctttagattttaaggcagcttaaatcttaaattgtatatgtttatacacggaagtctggaattacgtaaaaaatcagtgttttatgattctcttcactttctctctgtagccttaggactagaattgttctagtctgcttcatcttaagacctaagaagagtagctctctcctccctgatctacgtaaaatgactgtctggaacagacagaagtacagcccttctctctggagcaactttctgtgtttagtagagacttctcttctatggctgtctgcctggaatcagctgtgaaatgacgagtctggactagaggagacaaactattttgtgaagctgtcaccctgtctgaacttctgaaaggcctttgactttggagtttcgtttctttccatgaccctatccatgtgactgccttaggttgtcacagaatgagtgattcaacatagagacttccaggaatctggactctctgagtatcatttacatagaaatacgtttaaaccctttagccacaagcattaccgggcctatcagtggatgaatggccctacccactgttaatcaatgagccaacgatgccctctgtgaatcggcccctaggttgtttgtttcttcactggaggttgagaccaattatctcaaaagctttctggtgccaaactcaaattttaatacatcaaattgttttaaacataacacacaacaagcagatttttagccaggtacactttgcctcttttgcacaccctgtgaaacctatcttctgcttgccattgataaactagagcctatggccataagatcccaagctgctactgcccttaagagctctctgactcagagacgccctgctgcactgctgagcaacatcatctagtaagtcccctctcccattccctttcccctgggaattcacttgccctcctccttgactggtggcccctttgctgtgagcctcaggacagtcttatgccataggagactttcactatcattcaattctgcccaataaagcttgtcatgcattgctatcatatccttctccttgatcggtcaggaaatcccttgaaccctataccctgctaccagggtttgtgttatagggcaacatgatctatcctggggagctgggaaaagctttcataaagaatagacatttgagctgtgatcagcctttcttaaagaatagatatttgagctgtgacctaagggatgggtagggcttaatcaggttcaggggagaggaaatattccaggcagaagatgattttatccaaagaccatgagctgagaatggcttctttgctggaaggtgaagtgtaaatagggaaagtgtgaaaagtcaaggtcagtgagatgtctgtattatgcaggctcttgtcaacaagcaaagaactgtacgtgtgtgcatctcacactttgaaatgaggaggaggtagcagcatttacctgttgcctctggaaactatctgggggcccaaagtcctgggagctcatctggatttactttggagagattattcagattttaacccagagagacatatcaagttctttgatgaaagagcacggaaccaagcagagattgttgtgaattcatggcatatagggcctagctgtccctaagatgcattttgttgagttatatgatattattaaaaaagaaatttgaatagcttgctgtcattaaagaattgggacatttcttataaaatatgaatatctggcttcctttgaaaaattagaaatttagaaacgctgatatcacattctagcatgaaaccaatttgctggagaggaataatggcagtcaccttagctggtgcctgctgaattcatttctctatagtctccctgtctcccttagaaccttactcatgccatcttcttggcctggtaggcatttgagtttattacctcagaactggagggccatcatttccttctactcttgagggcagggaccatggtcttttaaa

SEQ ID NO: 60 - DNA, 2109 bp, synthetic construct
  misc_feature 1..2109: note = Description of Artificial Sequence: Synthetic polynucleotide
  source 1..2109: mol_type = other DNA
caaaaccattcaaaggcttctcttttctttcttctgatacagtattgcttagatggtctcttcattaagctgagtaagagtgcagattttcaattctttggagagattcaaagctatctatccctattaccttttcattattcctttagggtctcatttagtactaactggtaaattttaaaggccaaaaattttcactgcagatatgttttctgattctgagatagaaattatatctggaaggataatataagagaaaaaagatgggatctgaaaaggttagaacagtttcaatttactaattcattcaatttcaagatcaagactttgtatttcatttttagttttcttccttggtagcgcatacaatttatataaaaaataaagtttctacatacacgattctcattaatgttttggatttgtttctaatatttttccatcaatttatgtgaatcaaatcttctcttaggatccctttcacagttcttttctttatatccagatcttctctctgattttttctttctttgtccctatcatcttctcttttcactgcggctgttaagttaaaaaaaaaatcagaaagctattgatgtcgctatctttctcctgtcactttcatcagaaaaaaacagagttccaatgtgccgcatccagttgcttagcaacaatattttcaacctccctgccagcatgaagagtgtgaagctgggcctgctaatgtggctgcaagaccaaaaagagcatagtttgagtggaaataggaaaattaaaccctgaaaaattcaacaatctcaggatataatgaatgcagaaaaggatgagcattttacagtgggagcttcctttttctgcatgacatatcactggcagaaaactttcttctctaaagcaaccttctaggagttatgcaatcaaaaatgccaataagactgtgttctgcatccagttcctaaactgatccattgctttatttttccatacatatatttacaattccatggaaaagtagatattatgaatgtgaatgttttcagcacaagattgagtaaaaaatttttaataatgctttttcaaaatttattactattattttaatgaacaaaaactgatggcttttctatgtaagtttgtgaatatattcctattctttttatgactactttaatctcacattatttttttttctcagtaatagaaacacgtatttagtccatgtttggtaactgtatagctttcttgtttttaaataaaatgttttgattgctttatatttatgttgttcattggtatgtgtttgaaaatggataaatgacagaaagattgtcaacagagttcataatcaaaataattaaatgcaaaattatactttcaacgagaagattaaaaactaataaatatgctttatattttttctatttgtcatttaaaaatacattttattgcatataaattaagaattacatacctttatcagttcacatgacatatataattttatcaaaaactaattataagttaatttaaaagttgtttcttgaatttaatacattttaatatagtgtggtattctattttgagcaggaattgcagaaactggtatcttgtgttccaaatttgctttgatgttttcatctgcttgataatctggaacatgttttataatctgcctaagattcagtttttgcatattaagtgaaaataatacttcctaacttcagttctagtacaaaaaaaatacactgagataaccaatataaaacactaagcatatctggcatacaaacaatattcagtaattttaaagtcattgttacttagaaatttttagaaattagtgactagaccagataggttttgttccagacattttatcacattttaatgtaaattcatttttaaacattgaagcatactgacagcagcagcactcaagacattaagcatttagagatatagagtccacagaagtagagtatatgtgaataattaaaaactctaacagtagccatgtatgtagactgggtatgcattaatatttattagtatttttgaataaaaatgtaaatagcagactgtggaaaacatggtcataaaattctttat

SEQ ID NO: 61 - DNA, 2106 bp, synthetic construct
  misc_feature 1..2106: note = Description of Artificial Sequence: Synthetic polynucleotide
  source 1..2106: mol_type = other DNA
gttgacactcagtattaaccatcacaaggtggaaggtgagatcagcagaaaggggctaaccctgaactggtagaactcagagtttgagggcaggggctgatcattggtgcccagccacagtagcactgctggcaaaaaagaaacgaggtgcatcagagaaatctttccagatgaggacagccccatcctttcctggcctccaaccctggaggagccagagatagcacggttagtgggcaagggagaggagaaaagcaatatgaagaagtagatgaccatgctccttccttgatgtaagctcaaagcctgcctcaggcctgagctaagggaagaaaataatttcataatcagatgaaaacgtgaagttgatattagactgaactagacatttataactgaaaaaaagagatagaacatttatatccaagatggatgagaaaggcaatgctacctagccaaatctcatttggaatcttggaaaaaatgactcagtggagcaagtttaacagaaactggtgagaaagaaaagttgctttctgctcgtgaccaccaccaagttcagggggggaaatgtgttacttacaagtgtcttgctttaaaaaacaaataaataaaattaaaattaaaaactacatgattgattttaagataatcaaatcctcgcaaggcatgtgtttgcatatcaggtccctgccaatcttgtgaactccatctcaagctaacccccacctacacccacacaataactccagccacgtagatttctggaagcttctcaaaatataagctgcttatcacctcaggcacatacttttccctttgcctttgaattgcttgcctcttctcatcctcacatggctaatttctccttattcttggagtgcttataggcaacagaaactagcagaaacaagcagaaagtgaattcattggaagggtagagggtagctcacacaaacaaatactaaagaaacaattcatttaaaacacagctggaaaagaacaaaagccaagggagtccaaggaattaagatggaaggaaatgatggacaagctcttccagagggtgaatcatcttcagctgttttcattttgcttgttcacaggagaagagtcagtgctaggctgggacataggctcacccctgactaggagagggctgagtacttgcacacaatgcagaagcaaaaattcctcccaagaaaatcgggacacaattactacaataatggtaggcaggcaaaacaactgaaatccactccacttaagaacgactttaaatgtttcttcctttgccagttaatagccagcaacctttgggtagattgcttacagtatctctgcctcagtttttaatctcaaaatggtaaaagtacccacctcataggatagctgtgaagattaaattaataaatacatataacccactgagcacaactattgtacacaggaagtattatctgttattatcttttcggaaaattttctatgatcaccttgccaggtcaatctgttatattttcttatcccatcttacatttctcctttgaacactcagcataagtgaacttcagaattatttgtgtaaaggtgtctatcccactaggctgtgtatgtatatatgtatttgtataatttttaactgtgtatatctcattggctctataagggcagaggaaatagtcatcttttccaacttgtatatgtttccaatgcataggtcatagcagagtaccgtagactgacaatggaccccaaagatattcaggtcctaattcctggaacctgggaacattaccttaaatgagaaaaaggactttgaaggtatgactaagttaaagatcttgcgatggggaggttatcctggattgtctgagtggtccctaaatgtaatcacaaatgtctttatgaaaaggaagtagaaggagatttgatacagaagaagagaaggcaatgagatgtcaaaagcaagaagttggaatgatgtgaagaaggagtcacaggccaaggaatgcaggcagcttccagtagctagaaaaaggcaaggaagccaattctcccctagagcctccaagaaggaaccagccctgctggcaccgtggtgtt

SEQ ID NO: 62 - DNA, 2086 bp, synthetic construct
  misc_feature 1..2086: note = Description of Artificial Sequence: Synthetic polynucleotide
  source 1..2086: mol_type = other DNA
gtaacaaattaccacaaacttggaggcttagaacaataaaaaatcattccttcccatttctggaggccagaagtctgaaatcagggtgtcctcagggctgtgcatactctgaagcctctagaggaaggtcctttcttgcttcttctggcttctcagggagtcgtgttagcacgtaggctggtcatttggaacaaaatgcaagctgactgcccagccgagccagcggggtcaaagagctcagtctaaaaattaaactattgaaagcactacaagaaaacaagggagcattattttatattggttttataggaatagaggaggcctttccaagtgtaacgtggtggccccaggcattccttggctggtggctgcatcactccagtctctgcctccatcttcacgtgaccttctctgtgtgtctcttataagggcaattgtcattggatttaggggccaccaggataatccaggatgatctcatcttgagacccctaacctaattacatccttataggaaaaagaccgttttccctataaggccccattcatcggtactggggcctaggatgtggacatatctttttagtggtcaccagtcaactcactacagatgggttggtgcttaagcagtgagcagagtggtcctctgtccgcccaggggtgttccttggggtggggccaattctgggtcctgctgctcatccctgggccatctgtccctgcagcctattgggaagttctgcaaatccagtggcctccactagatcaggagtgatggggaaggaacacagggctgcttcagggagcagcgggctcagccctgccagttagtggggaaccgcgctccggccaaatcagagctggaacattcaagccagcctttgttttcccaagtaaatccagcttgcttccatactgtttctcagtctctggcgtcaagcgagggaagcattcctggaaaaatatgtcctctgaatcatattaccatcctgatttacattataatttcttcagctatgtattcccagagggaggaaattggctacgagacatcaccaaaaattcacacataagcacaaagcaagcctgaaagaaaaatcctatttgcagaaaaaggagccagtgttgcaaatgtggcttcccccatgacagaaatggccctggttaccagcaagaggcagcagggaagaagcccccctttctggagggattttccaggttcttgcttttttaaaaacagcatttaaagagagcagcttgaataaatccttcctcagggtttcctggagtgatcatcttgttcctcccttctcccctcctccttctctgtcttctctaccctctcttccttctttaagcccactggcttctttagtttttatttgcgcattgcagataacacttctctgctgaggacctctaggtgcactgtctctttaagggccagaatggtctgttttccctgcttaacatatttgtttgttcgtttgcatgaaaagggtaggaaagaccaaagcctggcagggaggtagaaaggaagacaggacagaagccaaccccaagggagtgagatgcacagagttccggtgtggggagcctgaagtggccccacagagctggggtctggacctggggacaggcttctttcttggtgcgtcccaggggaaggagcaattatatgaagtggcagagggagaaaggatcccttctgcagtgggggtgagctggcttctcatcatgcctactgcactggctgagtgggcaggaggccaggcatgaatctttctgatggtctgagaggcacagtgaccacgtttggtgagcctgccctaaacagaggaaagatgttctgtgtcacacctactccaacaacaactgaactggtctctagtaataaacaagaaatgatcaaactgccctataattgttgtctgagtctccttgggctgtcataacgaagtatcacaaacaggtggcttgaacgacagaaatgtatggtctcacagttctggaggctggaagcctgagatccaggtgttggcagggttggttcctcctgaggctgtgaagggaggtctggtccagg

SEQ ID NO: 63 - DNA, 2081 bp, synthetic construct
  misc_feature 1..2081: note = Description of Artificial Sequence: Synthetic polynucleotide
  source 1..2081: mol_type = other DNA
ccacatgcatgctggcagagagggcggcttccagcagatgagggccccggagacacctggccctgtgcctggcagcgcagagacagtggcgttcattttctccaaacatcatgagtccttttaatgcactctccctggtgctggtcaggcggagttctctgagcttggcactgctggggccctggtggcagggccacccctgactcagcagcactggggaccacggggcccaaatgtgttcagtgcagagctttgaacagtcgtgggaggctccgcaagtcccgaaggggagaaacaggctgagcctgaagcagaaacatctggcagggctgtggagggcagcagagacgatgcccccaggaagatggcatgggggtggccctggctgctggctgagaccccgccggtgggtgtgggggacctactgacaaaccccattgttcccagggaaacaagtctgccctcattgcacctcctgggactctgcactagcagcagactttcagacagtggttagaacttttcctcttttctcccaaaatattttattttttccactttggtcactatttctaaaagacagatgcctatttctatgaggcatttttagtgtctccagggatgagtcaggggcctggcctcgatgctggagtcacatcttccgaggacgataggggggccacatacctccagctctcaaggacaccacatttgtgacaaaggcagaaacaaaatgcagaaagtgtcttccggtgccagaatgggaagccggacagggagtcggagaatttgggggcccatgcccagtacctggatcacctgggcgcctccctttgcctcctggcctcccattccacaaaggcgcactgagcggggaggactggggggccctgggattcccccgcaaaaccaatcagacaggagggcgatactggctccctgctcaggcctcagggggttcaggcccacgcgttgggatactagatgggtgcagaggcgctgctcgccacggagatgtgcggccagtgtgtgatggtgtgcgggtctctctgtctctccgtagagcagggaaaagctcttcacagccaactcctagggaatgacagagtgcagcactagctgagcacccaccgtgggccagctgctggcaaaccctgttcaccccttaggtgatttaattcttatgactgacccttaagggggtggtctgtttactgccacttcatagctgaggactctgaagctcagagacatctggtcacttgctcatggtcacacagctttagaagcactagagcccggattgaattccaagccactccaaggccaaaccctagctcttctccccatgtcaggttatgtctacatagatctatcctgacagctgtgattctattcagaggatgcacaatggacagacggtgtgagctgacgcggagctcaaggaaattggccaaggcaatgctttgctctaaattcagcctcagtaaacatttattggctgagtgcatgcacagatggaagaatgtcatctcctttgtcacgacacagagatttcacctgaaccaagtccgctggaacccccaggcaacgcgactcctctcctgcacctgcatctgctcccaagagctgacaaccatccacttcttgagatccagaaaagaacctgtttcaacaaatcaaccccctagattcatttgcttcaatcctcttgtaaaactaataaaaatgcaaagtattaccataattaaagttttaaaattataccaaaataagttaaatagttcccattactcatatcatttttcagaatgatataaaagataatatttactatctagcagtcataatgaaaactaatcttttaagcacttaatggattttctgatacaactcaacctgctcccccagttattcttaagcagctccaatttcaaatgctgtccttactgtagctggtgtcaggaattcccagatggcactgaggagaatatggatttcaggaacacagtgacagcggctcaaatcgcatcacccagggaggctgcacccacctgccagcgcctccctcaagctgcgat

SEQ ID NO: 64 - DNA, 2073 bp, synthetic construct
  misc_feature 1..2073: note = Description of Artificial Sequence: Synthetic polynucleotide
  source 1..2073: mol_type = other DNA
gctgcacacagagcgcctctcctcctgcttcttgaccagccctgaccttgggaatttccttaagccatcttcattaagggtaatacaataggttctatccactctctcttttaaaaggtggtcaattttagtctttcccattagtgaaagaaggagagctactttaccttaatcattagcttcactgccaaaggagagcaggcacatggggtctacagggccttgtgcagactctgagctcaggcaggatcatcaatcatggagctgcctggcctgggatgctccctcactgggacatgtgacttgggcacagctggacccttcgaaactggctgggcactgctgggcccgagcccggagatgcccgcccacccacaggctcctggccggcccttgcaactgtttcatttactgcttgggacaattctccacagggctcaggaaagcgcatgctgctgccacactcggctccgcttccccttccaaaccctaatgaggtgagataatggatgcaggaaagtgtgcaaatgcaaatcaatatggaacatatgctccaggttcctctgttacctcagagccaggcagagagagaagaggaaagactttgaaaatattttgagaccaggactttttactctgccctaaagaataccaaaaactgtgaaactgtagcttccttgctcttttgcagccctggaccaggagacaaattgctaattttgatggtgtctcaggaatggctttactgctcacctgtctttatactacaacacaaaattaaatcatccaggaagaatgaggaacaaatatttggcaccaattctcctatttcacttctgcgaaagtctcagtatccctttgagcatggagacggaggccttgaactgaagaggagagccggccataggcctctggatctccccagccaggcctcctgccccctgcattttgactcaagtagcccaggcaaaaggccaggcagagctgggccttctgcccgagccattgcgtcagtgggctcagcaggccacactgctggccaaggaggtctccgctttccggagtccaggggatggagaagctggcatggccctctccgcactagccaaatatcctgcagggggagcttttgaccggacctttcagggcttacatcagatgctgaacaagcaagggaaaggaagctagcatttgtctgggctgcctgctctgtgccccatcctctgcatcccagtatggtcagtgttctcatctctgttgacaacatgaggaaacagcaagactccaggtattcaagtaaacagtggagacggaaagaaaacccaggtctgccagtctccaaacatgtactctttctgctttacaagaaggcatttcctttgtttcctataccctgcttatggtcatgacatacgtcaactgagcactcaagaaccagaagtccccaaaatcattagtcaacaaggatgaatcagttccctgcaaaggcccatcttttctcctcacagacctcatatgttttgataacggatcacaggccctctgtcattccatctataggcccttaccttaacccaaatcactctttagcaagaacagaaatgacaacagtgacaagactgacctcacaagtatcaaagcctttcaacatgtagcaaactcctatttatccagaactctcagaaaaggagtagagggtgctgtgcagaccagctgatttcgtagacagccttcaagccctaatacctcttactggctgtctgaccttaaccaagttactttcctagaggagctggagaacctagaggacttggcttcacatccttcatgacaatgggataatagtgactgtcctaaagggttgtcaggaggattaacaaaatatgagccggaccctgaagatagaccatctcagctcctgccccttatccactgcctggtagtcatacaaccttgggcacaacacttaaccactctgtgcctcagtttccttgtctgtaacatgagaacaagaatgccttctacctacttcatagcattgtttctaaaacacttagtgcagttgctggtttg

SEQ ID NO: 65 - DNA, 2066 bp, synthetic construct
  misc_feature 1..2066: note = Description of Artificial Sequence: Synthetic polynucleotide
  source 1..2066: mol_type = other DNA
gctgcacacagagcgcctcaagtctctttaaatttcaactccaaatccttgggatgtaactctcagcccagagctatatataaaccccttaaaatcagccacttgcaacattctgagacaaaaactgacttgggaagaataattcacacttctgacctagcaacaagataaatctgctttcctaaaaacaatcagtttggccataaactggtcattttttgtgggtgcctttactttatgccaatagatcattgtctaaaatctcgacgtatgctgtttttcaaataataaaagtgcattaattattttgtgatgcgttataacgttttctgctatctttttttatgacacaaatctaattagtacatattcttgagagatctaaagtaagaaactttattaaacattttcaaacttcttcctgagctagtagaagagcaagccaagtgaatttcaagtgacattaaaaataatcacagcaaaaggcttgagaaaaggaatgacatagtcagctttaaatatgtatattcctatcacatgctaatcatacttgcaaaaattgtagaattgcttatttggtatcattacttgcttgaactacttactacattcttgaaggtaattagtcctcagtaaccacacttccatgtattcttctttaaatagaatacctttgtatctaaagttagatatagagaagttaccttctttaaatagatgcctttatatctagagttagaacttaaagagaaatatctccataacagccaaaaaacccagatgtagcgtattactgtactctactatgttcatatttttttatttttcaacacgtaacctaacaggaaagaacatgtaaataaataatcactaaaacaaaatcatgttagattttcatggctcaaaaaattgttaagagatttgaaacaacaacaggtctttgtcatttaagaatacttggtgtctctgaaggttcatagcaacagtttgtttgtctgcctatcagtatcagtttacatgctcaagtgatactgaattttctctatttatctagtcacgcttctccccacttagatgctattttcaatcatcttaattctgatataattcatcacatatgataaattgtaagttccatactgaacattaacctgtaatcctacattccctacacacaaagaaatatcttgcagaagctattgcagaacctctaaaattaaaagggaagttaaaagttaacaaaatctgaaagaatatgttgaaaggttagaaaggatctaggagttgtgaaagaaaagaataggtgaacaacaatgaatatttaactaacatttgtcttcaacaaatataattatcatttgccttcaacaaatgtaactgggtctgagcaaacttatagatttacaatgaattccttaaaagttagtgtaaaagcagaaaccagagctgtcgctcccattctttcagaatgttttgatgaatcagaagtttttcttaaaaatgcctcaaagagtcaaaagatcttaactatattgattatttaatttttcactatctctttaaattttaaaagaacataaaagtaaaaaggagaagccaaggattaaataaaatatttgactatttattcagaaatacttcttattactctattttattttccatcttaattctgatttatatgcttttaccactgtccaataactaataaataagttaatgagatatttaaaaggtaatatgttttcttacacttttttcttttgattcatttactatttcttgtagttacagtcttgttttattaagcactttgagtctacatatcattttaatggaggtgtcaggtgggatgtccttctcatttaccctacaatgaatacccagacattcatccatcctactcagtcctaggcagatatgtgaattaattccttgtcacccacgatattccatcttcattgtttttcttcctcaacccccaaatcattcacatagtttcccccaatagcatccattttcacaggagaatcagtggcctcctgcatcacatcatcatctcttag

SEQ ID NO: 66 - DNA, 2049 bp, synthetic construct
  misc_feature 1..2049: note = Description of Artificial Sequence: Synthetic polynucleotide
  source 1..2049: mol_type = other DNA
aactaacttgcttgatgactaaatatgacagaatgtgattttattcaaagtctaccagaagacagacgagaaagatactcatgattggtccttggagagcaaacaagaaagccactttgaccaaagtaaattcttaatgcaaagtaaattcatgaatgtgttcaacagaaatgaggcctcagttagatgaaagttttcatggggctacaaactctaaatcccaagacattttgtataacccattaactctaaggagattttcaaaagcagaaagagctttcttacctgtgctccagttctcgaatggacagtatcactcctgaagtagatggcttctgctgtacagtggccaaaatggtgaattcactcttgttccggaacagctgaattaatttctcactcacatgaggagctgcatggatctctctttctatgtctaggaatcaagaagaaaagcaggaggaaacaggagaggagaagaggaaggagaaggagtagagaagaaatataggagaaagaggagaggggagatgagaaggaagaggaaaaaagatccatggttaaaaatgtcatgtccaaagaatccagattgcaattttcattttcctcttctgtcaatagttttcattttcaggcaccattccccactccctacagctgcattcattcaatgcaaatcccggaaatgctatctctgtcaccatgcccacttgtcactttgacaagttcccaattggccagacagtgattttctggcaggaattttgacgggacgctgagcaattcagtttgctgcaaacagattaggttgctgtaaataaggtgagaggtagtcggataaatgtggtcctaaattcagagaatcttgggataataagacccaaatgccactcagcatcctccaatttcactttttccatggacacagcttccttctccccacaatggatataggaaacctgtccttgccttgtacctagcagatatttactagcactaataatgccagacaactctgcctttgcttaacgaataaatacaaggcatgctcatgctccacacccgtgcctggaatttctccataagcatgcaatggatgactttcctcatgaaatatttattgaagttgaggccgattcagcaggcctagaggtgtgtgattccagctaatcctgctcctagacaagaatgtttctttctccaacatcagcataacgagagacatccatcacttcatacccagactcacccttgtcatgataaactgggtgttatctcattattttacactacatttttctggcatcagaaaggggcactaagggagcaaagttagagaagattattcagaggatgataaatgaacattagaagtgtgtttggtgacctcctctcacatcctgaccatctcctctgactgcaagataactacatggttatttctccaggactacatgggaagcccttgaaaaacatagaacttcaaatgctgcactgcccaagcaatatcacagactggtatacggaccttgaagaatctcatcctaaagaatggcttctgaataagatatccttcaattcttgacctcgggcctcagtcccctcatctgcaaaatgagggggtagactaggtgatctcttagaaccttcccaccttagccttctataattttttgaattgctgcttcaattttataacacagaaaagaacagcacagtctttcccgcctgtaagtatctagggtatgaatcgcagaaagcaatgtttgtcctccaccatggagacacccaacccaggcagaccagtctaccagtataaaacctacctgcacaatagtagcaaggccttcgctacttaattcttaagtggcatgctgtcagcttttatcaagtgttgagaaaagagatagcatcttgaaaaatgcttctatgccttctacaaaatcccagccaaagatattccagatgacatttaaaacctattaaatgtgtgagcaaatcactctgtaaactaaagagtattagaaaatgtttgttaatattattttt

SEQ ID NO: 67 - DNA, 2037 bp, synthetic construct
  misc_feature 1..2037: note = Description of Artificial Sequence: Synthetic polynucleotide
  source 1..2037: mol_type = other DNA
gcgctcgtgtgcagctcaggaggtacaggatgccttttatcttcggcctatggataaaaaccatttgccagtgttcccctgggtagccttccagtctttgagttctaggcaggagatgccattgcttgaaggaattatttttaaggcaagtttcacaagcattaacaaactgtttgatcatttttagcagatttttacttgagaacaacctttgggtcaattgataggttttatccttatctaggtggaaggcctggtgaagacttttaagaactttccattggttggcagctggtagatgaaacttgctgtcctctgatggtagctatcctgaggactaaaagatatatccttgagaggtggcccattctatttccgcaggagaatattgaggtttatttctcttatggggccctctcagatcagtggggcttcaaatggatcagaaacctggggtcctttcactgctgacttaactgcttggtctgccaacctgtttccttcagctatttcatccatccccttttggtggcctttacaatgaattactgccacttcccatgggatgaaaactgaggataatagtctgtcagtttcctgatggtatttgatggtagacccattatctgtgatgaagttcctctttttttccagataatgggatgggcatagaggactaggaaagtgtacttagaatcagtataaatgttaactgctttccctttgcttaattcaaatgcccttgtgagggcaattagttcggctacttgagcacttgtgcctgaggagagagatgcactcccaacaatattaagagtaactattgcataccctgatttatggatcccttgttctacaaaagaacttctgtctgtaaggagaatccagtgtggattctctaagggggtttccctgcggtcctctctggccacataggtttgtactactatctgtttgcagacatgtacaaactccccagcctcctctcggaggaaggtggctggatttagggaaggacacatacttagttagactgtaggtcgctctaatagcagagcttgatacctgaggagatggttttccattagccagagactccccatagaagacagcggtcctgccacattatgcagagtgtaaatggttaagttagtccccatggttaacttagtagcctctggtaccaacaaggctactgttgcaactgcccagggacaggctggtcattctttggctaccaaatcaagttcctttcttaggtagcctatgggctgctgggctggaccctgggcctgggctagaactcccagggccattcccctcctttctgacacataaaggttaaacgtcttccctatggaaagactaagggttggtgccttaagcaaggcttcttttagttggtcaaaggcctttctagcctacagttcacaaataagacagtgagttttagctgcctgagtctcctttattaggtgatataagggatgcgctatctcatcgtacccaggtatccataatctacagaatcctgtaatgcctaagaatcccctcagttgcttgagcattttgggtagagggaaggaggagatgggcttaatcctttcttcacctagttaagaaaggttccttctgacaaaactagacctaggtacttcacggaaatctgatggagctgagccttagattttgagaacttatatcctctgttagccaaaaaattaagaggaaccttactgttctcctgagagacttcctcacttcctcagttggggcacaaagggtaatgtcacctatatattgtaagactttaacatgaggataaaggaagtcagagagatcttttgacaactcctgcccaaactcttgccacatgtgtagcgttaacaggtgcatcttggggattccggggtttgtaagcctgccaggtggccattagaacctctgccttttttttggtgctgtcttggaattcctgaggtaacactgtccaggttagccaggtgttctggttggagagattcttaaatatgaaca

SEQ ID NO: 68 - DNA, 2037 bp, synthetic construct
  misc_feature 1..2037: note = Description of Artificial Sequence: Synthetic polynucleotide
  source 1..2037: mol_type = other DNA
gctgcacacagagcgcacggtctctaaatgccacacatttaaaaatgtccctttagtgggttgaattgtttcttccaaaaagatatgtttaaatcctaatcctagtatctgtgaatgtgaccttatttggaaatagagtctttgtaggtgtaatcaagttaagacaaggtcatactggattagggtggaccctaaatccaatgactgttgtccttataagaaaataaaattcagacacagaaaggagaatgctatgtgaaaactgaataagagaataggataatgcatatacaagtcagcaacaccaaggattgctggtaagtacaagaaactacgagagaggcatgaaacagattatttttcagagcctccagaaggaaccaaccctgccaacaacttttagatatgtagcctccagactgggagagaataaatttctgttttagccaatttgtgatatttgttatagcatccacaggaaactaatacaaaacacacgtgtgcatatatgaggaagccagattttcatgaaggaacatcagattgcagttttgcagtgcaaacctggactcaaatattgcccccatgattacttgcagtgttattctgaacacttattctctctgacatccattttctcctgtgaaacttcagtaattgcattatgaagaataaatacaataacatgtaatgaccagaacctgccacatgataacagcactacaaataataaaggtagtaacacttaacattagagctgaggttgcatgcagcacactcgatagcaccaaacagtctttcctaaagtaaatcaacagcttgacacagagccaggcccagaacccaagtacctgattccatgtacaatgtgttacctctacgttagaaatctaggatttctctaatttatttcctatttttcttagggctgtttggtttcttccccctattgttagcagaaaatctctatgtaatgctcataataattccaaggaaatgttcttctcttaatttgtggctcaaaccggtataatttcttctttctcaagtctgctgagaagtactgcatcaatggtcaggacatggacacaatttccacaagactgagtttagagtctaccttgaaatgaaaaatggatctgatatttagaaaatgaaaaacagcaagctagcctgtggctaagcaactgaaagttccactctggcacaagttgcttggtatgctgaaaattcttccatcttaagatttgaaagacagaatgaagacctaggggactttgttggttccagtgatctatcaagcaacttcaggaagcctgaaaaatttggatcatttggcatgtataatgccagacacattcaaaccagtgagatagtaaatcaatattccctttaaattatgagacaaagtagcaagcacaggagcacagcacttccagaataagagcacccaccagaattatcatttgcacaaaataccagaaactaaatgttcagaccattaaattgcccatcacaacactctgactggataaccactacaacatatgtaggtatgtatacatttaaaaacacataatgtatttaactgatgccagcaagaaagcactctatttttaatacaatgtcaaagaatgaaatatttatgacaacatccattgatgctagtagtgaaatcagtcattaaaaagtcattaattgcttattggtatgagacccagtgcttctaaaaaccccataaaaagattctcatagttcatgatttatgcattagtaaagtattacagtcaatgtgagactatttgtttagccccaatctgtctatccttcatgcaatatgtccgatcgctaaaagaatatgtaatagaaggccattaattgttcggtattaaaatgctttagaattatgaagaagcaatatcatttaccaattgtttcaaacttaaattgtacaggtattttcatttaattacaactactatttttgattttgatattttctcagcagtggtatacttcttgcttgtcatattgcag

SEQ ID NO: 69 - DNA, 2036 bp, synthetic construct
  misc_feature 1..2036: note = Description of Artificial Sequence: Synthetic polynucleotide
  source 1..2036: mol_type = other DNA
gctgcacacagagcgccagaagttggattgaactgagagaagttgaaatatgacatctttgtgcatttcctagactgtatagatgctgtcccatgccttgttcaaggactgggtgtattaccccagtggaagacatgactgtgggcttcaactaaatgcccagtttttattttatccaatttgttttggtttcttctgcttgcaaacaaagtgctctaactcaatggggtgacatatagtaaaaaaattgctgagctatacctaaacagacagaaaaggtgccaagaaatgagggaacacctaacgtgattcctaacaactttgctgaaaaacttatttaatcctaaaagggtctcatggtaaggatatttagtaggtcctttttacagaaggataaactgaggctcagctaattcaagtgatttggacaagatgctaaagtcagtaagttttggaatcaaagtgtgaagccaggtcaactatattgaaagtatgaggatgccacactagtccttaaagaatgacaaaggtggtatatgacatgtcacgtctgaattccttgactacaggttggtttatttacagatcatagggacatacttatcaaattaactgaaatagagcctgaaatgtcattcaaatgcagtcagatagggatacagtccagcaaggacaacctatgttctccatgtataataagcaattaaatgagtttcttgttaattcaatcagagagggacagaaatattgaaattccttggatcaagaaaaaaaaagtttttaatgcagttgacctttgtcattttcatgtaagagaaactgatgatgagccactgaactagcaaattagctcttcagagatgttgacagggtcagtaagaaatgaaacccatcttaacaaagatgagctggtttcttaggtgtatgacccagttttgcaggctttagccatgaagaagttcagaggaactttgaaaacagactttaaaaatgtacagattttatttgttttatcttgagacattcgactcttttcttcccattcgaaaaccagtgaaatgtaaaggatgggattgccaaatcttatgaaaggtgcagttgttttatctttttcaactgtttaaaagcaaacatttgaaacgctgggcatctaaactacatcaggcactgttacttccatagatcatttactcctcacatgagaagaggaaacattctttccaatttgcaaatacacaatttagaaaccaaaaattttcataacttgctacaatctctttccctcatcaccatgttacaatttaagatcactgtggagaatgtggggtgcagaaataaggcaaaggttagtttgaagatcatcaattttattgtttatattttctgggtacaggcttgactatagttcctatacttttttgagatgggcatggacctctgactgagttctagccaatggctctaagcagaaatgccttgtagcaattcctccctggtctataaaatactcccactaacaatttttcttgtttccctcattccattggcccgatagagacaagtctgaaagtcctgtgttaaaggtagggtagtgcaagatgaaaggtgcctgggtcccggaataacatggagaagagccattcaccaattgggaacatttattctggacctcaaatggcaaaacataaattgtagtgtacttgaatccttaaggcatttgggaatttactaccgcaatcagtgtcaacttagtagtataaaaagctaaagaccatgggggtgatagctttgttggtaggattttacattgaagcatggtccttaaatgtgacaattgattttattaatatgtggcaacttggctagattctggtgcccagttgtttgatcaaacagtagtctaaatgttaccattaaggcatttttcagatgtaattaacatttataatccattgactttaatgaaagcagcttaccctccactctgtgggtgggcctcatccaatcagttgaaggctttaaatggaaaaaccaag

SEQ ID NO: 70 - DNA, 2031 bp, synthetic construct
  misc_feature 1..2031: note = Description of Artificial Sequence: Synthetic polynucleotide
  source 1..2031: mol_type = other DNA
gtgtttatccgttgacccatgaaaatctaatattctatcagctttacagtggtgagaagcactgctggggggtgtccccctgccagcttcttcagccctaacaaaagggagagaagccttgtctaggaaaacccctctgagattgcttgcttagctgtccctgagaattgaagaaacaacatttctcatatccactaaagccttctgataatgaactctgtgataaggggactccattcatagtgaagccacaaatcattccagtgcatcaactttttgcagtcccaagagagataaagagggaatgttttggagttctttaaaaacattttgtgtgcccattgtatctcagacctagtaagctcgaaacacacccatccagcaccttgggggcactccaggtccttgagatataaaacctttaatcctcacgaaaactcaaggtagctgtcaatgtctcttacccatagtttccacacctggaaaagggggataagtatcctctccacagctataacggccagtgagtgacaaaaggaggattcaaacccagggctgtttggcctcaactccagctctggcctctgcgtcctgcctccagcctgctgctgtgcccgctgagactctgcttgtgccttgtcctatctcccaccacatctcccacctgtccagaccctcccatccatccttccaggcctgaatcaacaccctacaacttgcctgctatgaagtctgccccagctgctttaagtttttctgctccctccttcaacaaaattttttacctcttatcgtgtgtttgtattcttctctgttcttgggtcttattcatttccccaggatagattataaactcctctgggtcagaatccacaccttatatagttattccacttgggatcatcatggaagctgccattagctctagctgcacagatcttctatgcgtgtatcttttcctgcaggaaaaggttggcttgctttatcttcagaccttcttggttacttttttttttaaaggcttgctacaaagcttcattcagaaagttcaggagcaggcctcgcaactctgcaactccgggttaaccctgaaactcagctatctgcctccctctgcagcattctctctaaactatgtgctagctgaaatcactctcaccaagaaagtattcacatgaacaaattgaatggggcagggggttttttctgctctgttcattggtgtacccccaggacttagaatagtgcctagcatctggtaggtgctctaaaaatcttacgtgaatgaatgagagaatgaatgaaagttgttgaaagcacttcaaatttcagatgactatcttaatgagctgttcattaaataaataacctaattagccgtaatcaagtggaacccaggtgtcctggaccctgatcaagtgtggaaagtccaactctgaatgtttggggtgcgtcgggagagtggtattcttaaacactctccctggataattctgatgctcaccaatcaagagccactgtcttacagagaattgttagttattggtagtgagtctggcaaaaggctgtaagtacattggcagattatctgcaggtacaatcctcttgacaggcctaggcattggcctcagtgatgcctgtggcctctgctcaccgatgtgtatgtgagagttcctgcctcctctagtgtcttgcaaagtctggcctgagccccgtccaaagcacctaatgccatcgtacctgcgaagcagatggccaacgtgctcttaattggggtggctgtatccatctaattgggaagctgcctggaagaaccatctatcactcctgccggtgacaaatggcaggaaggagcagcctcccacacaatggccctgcccactcctgctcctccacaccttattatgcctgagaaattaatattcatgttgttttgtcttgacaagcagggcagagtgatgtcaggtagttgcttcccttgtcctccttctgcacattcccctgagcggctctggtagggctgaacctctg

SEQ ID NO: 71 - DNA, 2026 bp, synthetic construct
  misc_feature 1..2026: note = Description of Artificial Sequence: Synthetic polynucleotide
  source 1..2026: mol_type = other DNA
tgagtgttttaagactaaaaaatatttgaaccagcttctgtaagtaatcacaacttcaaagtaaaattaaattacaatatgaatgtttttaataaaagtgtcaaatgtagttttatgcaaagtgaaaattaaatatataaacatttttcttgaataaatgtataataataaaagtatattgctaagtaatatgaactaatatatagtgaaaaaataaagtaaagggctaaatagatcatttaagcagtcatatgcattgtaaaagataagagaagaaataaaactctaggtggtaaatttatttcttactacaccttcaggaatgttatttggtaatttataaatctattaaagtagaattgctagtaatggtgtgaagtaaattcagtttatttcacaaagtagaatgaattagtttatttcatggtcgttttaggtgtaccataaagataatgaaaacataaattttattatttggtcagaaatcacttttattacttttgattgatagtgactgtaactatcacattctatagcctgatgatcatcttgggtttgtgctctgaaatttgctttgaaacagtctttggaatataattacaccaggcacaatttgaattgtttcttttttttttccttgtgtaaagttacagtacaaaatcaatatttttatgaccaagaagaaattgaaaacaacatatgaatgcataattgtgcaaattaagagttttgtagtgaaatatatgttgagatcagggctgataccagacaaaactgggatatttctaactttaattgtggtgcactgtatgcactgacttaaagccttctactccttcttggctagacattgctttctgtaattagcctttgtgccattttatgaatcagggaacagaaggccgtcattcacttagtaatctttctgatagggcattgctatttttaactgaggactttatctattcaactgagtacctgcaaaatgtgaagtactcagtcttgtgtctgggggaaatggtgaagaggacagaaagtaaaagtggtgtatagtaattactgtagaaggcagatagctaagtaggcaaatatggcataccatgacaaagttatggaaactgtaatagagtgaacatataggaaaagcatctatcaaaacaagatgggctagggaaggattcttaaaagaaaagggaatattttcttggctgatatcagtataaaagcaagccaaaaaataaagaaggaggttgagagaaagttcaggaaagagattgtttaattaatttcttgttcaaagatacaataataaaaatgtagtcaaataattgcttgataggtgttagaacatatcatgcagatactaaatctttgaaaaaccctcacaggaaagggaaagtatctttgtatctgtgggctactataacaagtaccatagcctggatggcttataaacaacaaaaatttaacacagttccagaggctagaagacagagatccagtgacaggacgataggatcctggtgatggaatgcttcagattgccaattgccatcttctcatatccttacatggcaaaaagagaactagtgaattttctggagtttctctcataaaggcagagccctcatgacccaattacctctcaaaggtaccacttcctaatgtcacatgggtagttggaatttcatcttgtgaattttagaaggacacatatatgaagtttataacagaaaggtttctttccattgacatattttttaaatattttatatattttgattaatgaatatgagtatttaataataaataacttcctttatttaaatgtaaaaatcagcttgagatttggacattatcaattgcttaaaaaggagtacagagcacctcatgttctaatacgttggcaaaaattaactacatataactcatcattattttataaaagattattatggtgttttagagatgtttttgtttgttttgttttaatttgtttttacaagcaagatttctaagtgttaat

SEQ ID NO: 72 - DNA, 2014 bp, synthetic construct
  misc_feature 1..2014: note = Description of Artificial Sequence: Synthetic polynucleotide
  source 1..2014: mol_type = other DNA
ggatagagtataatttctgttttaataaatataatttaaatggaatctcagcattaaaattcctttcgaaagaataacaaaaaagagaaaaaaaatgttccagtaaatggcattctatcattggtaacgtgcgtcagatcccataggcttttgggaatttattgcatttacttgattattacacgagcatgttaaagccaattgaaagaaaacaaaataaaaaaattgatacttcactggcctaacttaaactgtgctagaaatttgcagtggcatcggctgctacagaaatggggcgatacaggaatagttaactatgtaaaaatgcaatacttactactacatttgtgaaaatagcatataacttcccattactaaaacagaagttacataaattttttccttttacattccttatgaatggatttaggttttggattacctatataaactatctcaaatctattgctttacttaactcactggtagagacttataaacatattattacagaagaaacatagaagccaataagaaccgaaacactattgagtataaatatcaaattattagtaagaatgcttccaaatgcattccactatggaattcaagctgtctttggttttcagattattctccttcattatattattggtttcatgttattattactcatttcaccatattagattttatattatttaaagtgaaatgtgtatcatgttcatctttatattttgtttttatacatcaataagaacatacctagaaaaatgccttgtatagcttaagtgtctaatcagtgtatattatataaaggtgaatttcaatatgaataaacccatcaactattttattttagtctctaaattgaaaaagctgttctttgtaacatggaccagtgaaaatgaagttacataaaatatgtgatgataataatacaatatttaatattatatataaaacaatatcaacacaatttaatgtcagatcaaaacaacaacagaaattcattagagtaagaagagaaattgagaagggtgaagtttctcgaatacagaaaaattgtgtatacatcctcctagatttagcgaggcatccctattctgtgattcaccattggtgaatgattaattaagagttgatacttacagagagtaacttgcctattttggtctcagtagtcatatggtccttccttttactttgtgtatgaaacatccaatgtatccagagtaaagacaatcaatttaataatttgtcttgtggagccaaacagaggttgtttagctctctatcttactatcattttccattttcacgacaagatttataattcagacatgctgggtaaacctataacatgtggctatcttgtactttctatccccaaataatagcaataatatttgtacattttcttttggatctttcatattgcctcagttaaaaaacaaacaaaaaaggcattatcagcaggaacaatgtgggtgcattaggcaatgctgaaatggaaacttgctgaaggatagcttatatgagcagagcttgcagaatagttcccaagagtagtatcatagaagatagaaactcaggtaaattcttctataaatattttaatactaatgaaaaaaatcttgaaatttgtcccatatttctcaggcagtagccgtaagtacagagagcataagggaacataattcaagaaactgtgaatacaaattttgttattctaactctaaactcatgatttggcagtaatctagtcttaaatttcaaaggaaatagctatgattttatataatttaaccctcccttgaaaggtaaattcaagttaatgctatgaatcagtagattacaatttcacaaatgaataacagttttgtaaactgcaaaacacaataaaatcagagatttactgctttcaaagtctttacaaattattattaattattttattttaacctactactactcagctttattctctgaatgatggggtattttctacacc

SEQ ID NO: 73 - DNA, 2013 bp, synthetic construct
  misc_feature 1..2013: note = Description of Artificial Sequence: Synthetic polynucleotide
  source 1..2013: mol_type = other DNA
attatgagaacagcatgggggaaaccacccccatgatccaatcacctcccaccagggagctcccttgacatgtgggcattatggggattacagtttgagatgagatttgagtggggacacagagccaaacaacatcacatgtgttgggatttaggtttccatggatgtaaacattaatctcacccataaagaaaacagtttattttcatcccaaaatatcacacttcattgtacttggcatccatatgtcacaatatgaaagatattgtattttaatgaaaaaaagtaagataacagccacctcagttacaggctttgagaagtggcaggctactttgtgtcaagtttgagatccaagctctggtcattctgatcaaagtacaatcattatttatggactcaagtaattagtgtgaaagacaaatgactattataattcaaatctctttcaaaacgtttattattgaaagagaaaaagtttgcctttgtcattaaaaaagctatttaagaacatttacacatattaactcattttattcttcttttcccttattgttttgtagaactgagaccattacttgtgttatacgaagcaagattggtgagaatatttcagaatcattagtgatgggactggagccatcactatatctcttgtagtatctttaaattactaaaccagcctgagcatttagagacagagtctgttaaaaccttacattcaagccaagtcctacattcaagctaagagtctgcttgaaaagaatttgtacaggtttattccagggtatcaggtttgttccaggatattggttttcccttttccatgatatatagctctatgatgatgcttcctactcctgcctcgtctacttcctcttttttaaacctcctttcagataccacattcgcttttaccttaaaacttctaataacagcaaactagaagtaatgcaaaagtcttgatgcattaagtagcaagggaacaaataaggttgttgtgctatgttgtaaagaacaaggaataaagacaaagacataggatgaatcaggatacatacatatggacttatgtcctacagttaagcagtgcttttattgtgcattattgttaaaggttaaaagtataagcattaaagcaagtgaggcatgaggctgctcaggatgatcatatcagtatacatcaaaagagcttacctagaggtgagaaggacgaactaatcattaaatggaaactccaaatcagaatttaagtttatcctctttctttaatgtcgcataagggcaatgggccagatactaatgttggcaattcaaatatttttaaatgaactttcttcggttgattttcttctctattaggatggactgttgtatctacagtgccaactgaagacaacattttacattcttggcccttctgtactaatacatctgctttaaatgatacctgcgatccagtttgctgtctttctttttttagggaaatcatattattcagttatttcaaactgtgaatttattttctccagagatacagtattcaggctgttactttatattggaagagggctaaaggacttattctctgactttaagtagaggagaagttattagttggagtgatgagagccccaggcatcatggaatcactagatagcactccagtttactgattcttctctggtcaggatctcagccttaaaaacagtatgtagcagcttcataaatattaaaccctatctggcaattaacaagtcctggtaggaagggcgatttgagaaaggggaattactactgaaggacttcggctcctctcacatgaggctattgagctaccctgaggtttgtttatggacttcagtatcaagaaatggccagggctgttgacgtgatattgtaatctgaaggtacaagtgacaatggtctcaaggcaacagagtaaaagaaaatgttcctttaaagaaagattccttcagtctatcaagcttagcctgttgagagatcaaggca

SEQ ID NO: 74 - DNA, 1995 bp, synthetic construct
  misc_feature 1..1995: note = Description of Artificial Sequence: Synthetic polynucleotide
  source 1..1995: mol_type = other DNA
ggattgacatgagtgtatgcccatccctgaactaatattcatgttcagggagatggagcaccgcaggtcacatatagatatacgaattcacggagtgatgcgggaagaacctgacacctctgttgccccactcacccagctcagtgttctcctggtaagcctctcacccacatcctctgcctttgtcttcacagaaattcttatctctggacttacagggagaccccagagaggtaaggaccttttgtttctggattacgggttttgagtcttagcacctttaagctccaattaactgtgagtgaaagaatcatctcttgggtaattatagtaactcctgcgtgtttgtttctgaggcccagagaggggtagtgactcacctgggtaacacagccaggaagactagtggctggcctggaacccattttcctgactcccagtccagtgctcccaggcatcacctctgtgtgccctgggctctgcccactccccttcttttttacattttctgctccccaaaatggcactgtaggaggaggctgaaacagaaccttccacaatcaggaggcagagataacagcgatgattagccaaggagaggggaagcctaaatctcagtccaaggacactcgtctcctcccagcacacaggaaactccaacagtattctcccaatctcctcatccccactcccacccccacctcccagtgggttgacagtttctggtgacatcacctctgacgaatcttacaatcctgtcctctctgctgccttcctggaggtcacagcactctcctaaatggtcatgggcggagtacacgagattcatccagcaaagacttaataaacacttcctatatgccaggacttgtttaggagctggtgatataggagtaaaacaagaaagactccctgccctcttgggaccttccattacagtgccaggacagtgcaataaaaaagcaaatcaagtatgtattccgtttgatggtgtgcagcattaggggatagagtttgtgggtggcttcaatttaagtagcaggatcagggaatggttcaatgagaaggtggcatttgagccaagctctggaggaggcaggaagccagctgtcaggaaacctggagaagcctattccaggcagagggaacagtcactgcaaagaccctgacagaaggggccagtctggctggagaggaccgagtgtggggacagactggcttgaggctaaagaggtaatgggcagtgggagagagatcaattaaagtacttggatttggattcagagcaagatgggaagcctttggaggttttgaacagaggagtcacatgatcttagatctcacaaaggtctctgtctctggtgttcaaatagactgtaggaaaggggcaaagtggatgcagttgaccagctgggcagccactgcattgccataatccaggcaagggctcctggctgcttagacagggctgtggcagtggggatgggaggagtagttggagtctggatatctttgaaggaatagctgacaggatttgctgatggacaggatgcaaggggtaagaaacggggaggagtggaggacgccctgagttttctgacacaacaaggttgtgcccacacagggcagccacttgcaaactctaagtggagaacaatcacttgtcattgttgctgatggcagtcttccagcatggctgtcacccaactgaggtgctcccgtctcttgcctcaacttttagcctcttctacttcaccttctctccccatttccatgtctcatggtgcagccagactggccttccttaacagaattagagcacgtcacccccacttcttaaaagcctgaccttccttatgagacaaatccccttccctccatggagttagtccttcaaaacacacctgcgtgcacactgtgtgccagactgtgcagaaggtaggctctgcacctgtccctccctctagaccctgccccacagcatttctccaagcc

SEQ ID NO: 75 - DNA, 1989 bp, synthetic construct
  misc_feature 1..1989: note = Description of Artificial Sequence: Synthetic polynucleotide
  source 1..1989: mol_type = other DNA
gctctggcaaaactcagacagaactcatggaaaatacaaagttttcatctgtgtgtgtgtgtgtgtgtgtgtgtgtgtgtgcatgcacccagaaacacacatgtaagcacacatgtagcaatggtttaaaagaggacttttagagctctacagtcagggtcaggtagagacacatatctacgagagaaagcaaacttttcatcataagtcaaaggaaagggatgcaattaagagcgagcacagatctttagaaagcaataccaaatggtttgtaaaaggggatatttgtgaaaatagtgatcgtatgctaaaaattcctcacatttttatttcaatgccaattaaatattccagttttaagtagttcaggatggaatttttagtcacattaagatatcctcctctcaagttctttgctagaggctactagttttgtttccaacattttctgccttatcagctactgactgaaacccattaatgaatttaattctatttaacaaataattaatgaagacctactctaccaaaccaagtatagtaatactcatggaggcaattttccgtaaatatgatgaccagctttatgaacaaaggacttgtagtaagtcccatctgatgatgggtccaaaagtgaatgcaaagtcagggaagttagaatctctagatgcatgcattctgagtgtacaagagaaataaagcctctcaagattcccaaaagatctgtttcttctactttatacatagattcaaaatggataattttgttgatcaagaaatccctttcaaatactacctgaaaggacacaaaacccagggaacatggaagaacggaatcaggtcctgcagagcaaaggagaatacaaataagaaataaaattaacttttgtaacagcagtaagatggttgttagggaattttatttttatagtgaaaacttaaagactgagtttctcaagcgttaaaatgaaaatgtttttatttgtgaattcattcattctgcaattatttagtgaacacctactaatatcagggagcagtttatgaattttgaaaataatgatcaaaacagacataatctctgctttcttgcagcttttatttaagtaagagggtcaaacaaaacacagcctagtgaataatagcattacatatataggagataataaatgctatgagaaaaaaaagtgcaggataaatgcaagggagggtcagggtgagttggaactttaaatagggtgatgaagaaaagcctctttgagaaggtgatattccagcaaagacctgagggaggtgaggaaattagctgcactaatgcttaaggaaacagggacaaagaaaggtaacattttgagatggtgcaaataatatcacatttatatgctgatgggaaagatctactagcaaaagaaaaacatagtgaagaaggagaaagaagagaaattgtggaaacactgagaaatggaagaggaaaggatctagggaacatgtggaggtatgctttagagaggagcacggaccctgcttgtatactaacaggcggaaaagcagaggaccattttgtgtcagattgaaattccacatactggaaagcccattcctcagagagtgtgcgacaacagcatcaaataacttccataactaatgtttttcttttgtaaaattaaagtttataattaatgacctattgtggttactgattatcttgatagacaggaggaaaacagtgaagagtagtaagactcaggcttacatgcagaagacacatcaagaatagaacagactgcctaacatcactcacctctatatcacaggctttcacgttttttaccaattgcacttggatattgagtggctcgctctagcctatactgtaagggcagtgtgttggaccaagtgaatgtctatgccacttcacagaggtaccattccagatgtttactagtgttccaggtgttgacaagttaggataaatgtgatcacaaagat

SEQ ID NO: 76 - DNA, 1984 bp, synthetic construct
  misc_feature 1..1984: note = Description of Artificial Sequence: Synthetic polynucleotide
  source 1..1984: mol_type = other DNA
aatagaatatctgatcaccaaaatattgcaaggaatattattatttatccttatctattaggaaaagaaagctaaaaggcagaaattctcaagttattttccaggtgactgtttaatttacctaattatgagaaactacacgaatcttcaaaaaatagcttctttcttaagatttacaataaatgaaccgaagtattattgacagaatactataataattaagattggtgtaaaatggttgagattagccaaactctcagttaaagcaaatgagctaagacttacagaaaaagtaatctgccttaaatgccattttctctttgcttggccccaaatggctgaataaaaatgctgaagcttcagtctctttaatacagaaatagacttcagtatctgatgctatcatcaggaactatgtatcttgtgtgagtgatttttttttgctgtgagaagcaaggtgtattcattgcctatttctgtggaacaaataatccctgaacttagcaacttaaaataataaacaattattgtttcatgatttctttgggtcagggatctgtgtgtggcttagttgtgtgtttgtggttcagtgtgtctcacaaggccgaaatcaaggtggtggccagggccacagacctttcaaggctcacctgggagaaggatctgctttgcaggttattcacctggtcattgtcaggcctcagaggacccatttccaggctcactcacatgcttactgtcaaacaccaggattttgctggttattagctggagatctctctgagttcatttcctgctgtgtggcctttccatagggcaggtgaaaatatggtaactggcttccctccgtagggcaggtgaaaatatggtaactggcttccctccaagcaagcaatcaagagaagaagagagatcatctaagagagaagcaaaagtctaacctcagaagtgccatccaatcatttacgctgaatcctgctccttagacgcaagtcactaggtctagcccacactcaaagggaggaggtgtgacaaagaggggaatactaggatgtgggtggggatcactgagggtcgtaatggaagttacctactacaatctggcttcacgttttagttttttgaaaaatcattcacacactccaaaatcccagttaatggttttgtagctcactgcataatcctctgatttgttcttaagtttttagttgtctgtatttattattataagctgcagcatttttttatttatgaaaataaagaaattgaaaacacaaaggtgttgcagaatgtgggaaatctatacttaacaaatgcatggaagatgacacaaaatcccatccacattccatttctcttgtgaaatttgttacagtggagggaaaataatgctatgctcaaaagcctataggtaacagcaaacggtccaagtcaaaacagttctcatctattcttcagagggtgtctaaactggaaatatagttgacattttgtattaagtgcaattgaattggttcatggttttcctctttacatgaatttactaatactgttgtattacaaatggtatattttataagatccatagtttactttgtttttatctatctttggagagcaatcaatagacatagaagcagataatcagaaatgtgaggaagggtctttaggaattacatatatatttgtttctataagtggaaagatgttactgaaaggcaataattactaatggaaagagctcagtagctggtttttaatatttcaaaatcgctaatggaaaatgaatatttagccatgataaaactatatagactaaatgattagtttatttgcttttttctgtagttctatcactgaaatatgaaaattgtcacgtatctgtagttctcattagcatatatttgcagatgtgtgtatatatgtgaatatatatgtatgtatgtgtatatatatttgtgtgtgtgtatatatatacacacac

SEQ ID NO: 77 - DNA, 1965 bp, synthetic construct
  misc_feature 1..1965: note = Description of Artificial Sequence: Synthetic polynucleotide
  source 1..1965: mol_type = other DNA
tgaactgaattaaaaaataaaagtacaacataggaaatttacatgatgcagctaaagcagtactaatatgtacatgtatagcactaaatgttatgttagaaatgtcatcagcccacatcaggagtgcttttcaggatacctagccagcttcctggaaacaaagtcttcactattagcttttttataagttcactttgttgttatactttttctttttcacagtatgaaattactttcttttcttatatttccattcacattattttttaaatttattttttggttaactgaaactttaaaaaacttatctggtacaaattcaaatttaaactttttgtggatagatatttaggatagtaaaaatagagcctggtggtgaatagaaatccctccagagcagcctaatgcaggatagctggcacacttacaccttcctgtgactatgttgatggcctctactgatccatggcactgtttgtgttctaagtggctacacactaaagatattcccaactgggaagtctgccctgattaatgtccttcacacataaggtacagatggcatggcacttcttgccttaattaatttattagggacgccatatgggaaaaacagctttcctttcaactggaattacttggggaaataaaacgacaacccattgccgtgggactacattaaattatcaaactagctgaagataaaagaaatcaatgaattgcttggacagaagctgtgtgcactggcatctttccattactcctatttttgaaaaccagatagaatgcagtttttcaggtgatgcaacattttaaatgcagaactgtttattagagttgacatcaagtaaaaatattcaagactgagttaataagactgttcagctgaccattaggatgccattgtttaaaattttgtgtaataacaatgtgttggaatgacactggggcaaaagcgtgggtacacaattaagttttaaatctgtgcatttattaatgttttgctctaaatgttacattcgtgcactaggagaaatatacaatctgtgcaattgcttagggagcaaataatcaacatttcttatgtaggtgtaagtaactatgggtattagacttttcctcaaacctgtgtttttcaatctcgagtaattatacaaggaagatgctcaataagtatttgaagagttaaataatcttccaattagttttaaatttggtggcaaattttcattgccatttcatagttcactaaaggatcatggggttccttttaatgcactctacaagatattatctgactactgctctaagagagttagcagcttaacttgcatgttaatattcatagcaacaagtcctttacactatttttgttttacagtgaattaaaacatcagaaaatctaggccatttcctgaataagttatacaggcacaaagatatatatttgctggaaagcatttatatttatttttcttttctcttatacaaactatcaggtacaagagcattatatttagaggtgcagaatacacagtaaaatatcttaatttttaaaattgcattatctaactttctacactaatattaaaacgctaaaatctgttgtttgggtatctttttaggaagataaatctatgaggatgtctatgcaatgccaacaaatcatatttcactgcataactgaacatatggagattaggaacctcataaattgaattttaaatgaactgaccttattggatccttgacaaaaggaaaaaagaatgtaccaacaagaatggaaatatattaatggattagatttatcacgagtatcaaataaaataaaatatactctgttagataaaaaatatgataatatacagtaattcatattctactggttagtttaccattgacctcttccctctcatacttcccattataaaaatagtgtgcagttattcaagaggtgttgttcag

SEQ ID NO: 78 - DNA, 1962 bp, synthetic construct
  misc_feature 1..1962: note = Description of Artificial Sequence: Synthetic polynucleotide
  source 1..1962: mol_type = other DNA
agggcctcagtttcccctgtctgtaaaatgggagcattggaccagagcattccgaggcccatgccagccctgagtgaccccctcccccaacttggctgtgagctcctgggggtgggggtggcgcctgcctgcccatctctgccctcggttggtgtccgcaggggaaagggaagaggctggactcggggagagacccctctccactcagccctggtgggtgcgggaaccaagggaagccagccctatcttcttgtctcaagaccaagaggacatgttttctccctggagctgagctgagctttctttccctatgtttatttgaaatttcatttttaaagacgagtcagggaaaaatgaggcttgcttctctccctgcccctccctgaagaattccagaagctgatttgtcttgtcaggatgtggcagggagccgtggcctgggctggctctctgagctgttgcatattgatcagcattgatgggtttggcacagtcgagttcttacagagctggcggaagtccctctggagaaagaactgcttcggggactggctttgatttgcaatgagtgtaatagattaaagcagtgggtcagcatgtcttattgagcaccagctgtgtacctcagccctggccctgctgggatccaagctcagatccccgcctcccccgaccctctcggttgccaccgagccccacctctgcctgcccgctgcacctgctccagtctccacctggcttctcctgctaggggctgtgccctgcccgctagctgcctgagcctgacattcagggccctccagtgcccaacctcaacccacagcccttcactggttcagttgtcatgcagtccgcagacaccaggaagcatcctctgcgtgcagccctggagatgtagaggtgacgaaggcagggcggcccagaagacctcacctcctgctccaccatcctgggcctgggcctagcggggtaggctggcagcaggcctgctgcctggactctgggttcgagctggctgggttttcctctgtgacctttcccagccttggtggccgctgtgcacactcttcagaatgacgtctgcagagctctcagcctggggcctgcccgttgctgggtggttgcaggaaggaggccacttgaccccgttccagccaatgatacctccctgaggacaagggtgaaatgtgccgggaggcccactgcctgccttcctgcttgcttgggcacatgtgaggatgtgatgcccggagcagcagcagctgtcatgtgaccaggaggagctgaggatgaggatgaaaaccatggaaggaaagagggtgtgtcccctgtgccattgttcttgagcctccaagaacccacccgggacctaccctttgtccagacttcctcctgccgaaggacgtactaagtggacttactgttttacccttttagggaggaaggttctgtaacttgcggctgaatgcgtccaagccatgagttgtcccccaagctcgtgagttgtccccagctcaattctgcctcctttggagagtgacgtcccacacacctgtgcaaccttgcatgccaaaaggactttgcagacatgactgaggaccttgcatgcgggaggtgatccccacgacacctgtggacccagtgtcatcagggtccttgtaagtgaaagaggcaagaggaccccagaagaggaggtgtgatgacagaagtggaggtcggagtgacatggagacgggacccctggctgcaggatgcagtgcttctgggagctggagaggccaagagacagactctggcctggagccttcggaaggcaccggccctgcagaccacttcagacttctgacctccagggccggaagaggaagcttggtgtggttctaagcggtggcatttgtgatcatttctcaccgcagccacagtagatggaggcaacacccgtgggtgtttgagggatggatg

SEQ ID NO: 79 - DNA, 1952 bp, synthetic construct
  misc_feature 1..1952: note = Description of Artificial Sequence: Synthetic polynucleotide
  source 1..1952: mol_type = other DNA
gacagggtagaataaagtgacatttgggacaagaaggatgtggtgggtgaggatgagtcaggtgaagcaggatagagtaagagagtattcctgtcagagagaaaaggtataacgatgagaactgataaagcatagggaattacattgaatgaaagattagtatagctgggtggggaggtgtgaggtgtactattccatgatactgaaggagtcagcggtggtcagttttgcagggacttgtacccatgttaagtagtatagactccatactgtgagcaataggcaactcctgaaaggttagggaggacagaacggttacgggatttgcattttagaaagaccacctattgttttgtcaagactacactagcgagaggagacccgtttggaggctgtagcagtaaaactggaagatgatggaggtctgacactgggtaaaggccttggggatgcagagaggtggacaaagataggtagctttggcagtccctagtgatcaattagaagtaatggagatagtactcttgggttccatggatagtactcttcgcagagagtagttgccatctcttagagactatgtgcttaggttggagattgtcgtatgttccttaacccatataacgtaagataaaagtattagatggaaaaatatcagcaaagcaacaagtatatttaaaatgcatatatatcagtgatataattgggaaaaaatggaaatctagaagtaactgcccatcacctatttattcattcatttaataaatatgttgtatgtgctgtggacttaagggaagacagggttagtgtttttcctgttctcaaagacctcataagctaatgatacatcatagaagttcttcctaatgatttggaagactcttccagcagctttaaactcagaaggggatgctccttaagcacaactatcacactctgggagactaagtgctctctaagtagaattagaccaccacaggtcagtgtgggatgcagaagcagatcagcctaaagtgcaggccagtaccagaggaacaggacctttcaggactaagcaggaggactctgaaacacttcagactatgctgttaacctatgcccaatgtgcagtgattggaagttaacaccaaatctatagttgacacctgtacctagttcttcaacaaatagtattatttatttcagaactatgccaaagaaagtacattttcagacactattaagatttagtgtagtggttaagagcgtgactctggagcagactatggagcagactgccaggaccaaccacttactgtttgtgtaactttggcaagttttcctttgttcaaaatatgtttatttttctcatcttaaggctggaataacagtgtgtcttatggcataaagactgaatgggacaatatatgccctccaatagtactttgtccatggtgaacatttaaacaatagctgttattaacataacctgaattacaaggacctgacatttttactcattattctagagctcactcatcgcaaaaacaaatgtatttcttttataattactttagtaatgtgccttttttgttcccaaaaggtacaactttaataactcaatttatttaaaatttttatttaaatggaattaagtagtaattttcttgacatcaccttacacttttgaacatttttaacttccaaatagcttttagatcttcataacatttctataagcatcataggacagatatctcatttaataaattaggaaacggggtaatatagatttagcgatttgctcatagtagagttaaggcttataagctcttaatctagtatccatataaatcaaccaaaactcaaaaaattattgggcaactgttatgcacccagcattgtggtaggtgcttcggaggatagaaatgttataaaatactatccaaaaccaaaataaatttactttctat

SEQ ID NO: 80 - DNA, 1935 bp, synthetic construct
  misc_feature 1..1935: note = Description of Artificial Sequence: Synthetic polynucleotide
  source 1..1935: mol_type = other DNA
aacaaacaacatgtggtatacccatacagtggaatattattcagccttaaaaaggaagacaattctgacacatgctacaacatggatgaactttgaatatgttatgctaacagaaataaaccatgaatagacacaaaaagtcacaaaatgataaatattgtatgattccacctctatgaggtacctagagtagtcagattcatagagaaaatagcagaatggcagctgccagggcctgaggaaggggaatagggacctaaggccacagtctgccgaccctggagtagacggagatgaagatgacaagacagaagccagggccctgaggatgggattgagaataagaactcagaaaccctttcatccagggagatggggagaggacgcaggagggaggaaggagctcctgagaggaggcctgcagccccgtaggcccaggagcagcacaccgctcacagccagaaaggagaggccaggaggcagggcagagccctggcagggcaggcgctcagggagagggtgggagccacagctctgggaggcagggccaaggtggccaagcagcactgagctctcgcccagggtggatcccccctgcaccctccccaagcttcacggcctgggtacaggaaggggtgacaagccatgcagcaggcatcatgggtcagtggacaggggacaggcagttccctccagcacggagggcacgacaaccactgcagggcaggcagagcccaccagcgcccaccaggctctagggcaaccaaactagatctgaagggaaactccacggcccttcttagaccaacccccttcaatatttcacgctgtttggtggctctgaagatgcatggaggttctagcggggaagagcccattttcacttcctccatactctgcacacagggcatccaggcccagaagagctcaacgctgcctggcatggagaggttggcgcaggctgaggctgctgggctctgaggactcagggtgtgcagcctggaacctgcacctcctaatgaaatatggcctaagcagacaccaggatccagggcccagccactcctctccccgatgctgaggccctcccgagagcccaagacacggcatggagctcgcgcgtgactgcgagcaaatgccctggcctcaggccgccaggtcaggtgcagcaggtctgtgagggaccccgtgtgcctcttctgtgggggcagcatcagcttccctcctagagaaccacatggagcagatatgggcggtgcagcagagcgctgcagcggggggccaggagggtccaagcagtgctgtgatcatccgactctctaaccatgaactcacctagagatgcattccaaccacacctctctaaaatacatgtaggtgttagtggaaaacacctgttatctgtttctgacttaataaagtctatttcatacacacagacacatttggtttacaggcagatgagacagtgatcgggcacgtcagcagacagtctccactcaggccctacaaatgaacaacaatcttcctttccgttttgctttcctctctaaagtcccccgagaggaggccctgcccaggccggcccccaactcacaggctccccagactgcagagatgcaaactcagccacacacccaaggacgccgcttctctccacagcagagcagaggctcagctggcccactccagtgacatggagtctggctggtcagcgacagcccctccagccaagggctccaccttcagcacaaatcctctgcctcgggactttctctagtgcttgatttcttgtatggtcagccccgcggtattttattgaaatagatattattcctgtcatcaaaataaataaacctaactaaaaagaatcctcttcacttatttgaagagtgccattttgggggactcttcaatatttttcttggcttttta

SEQ ID NO: 81 - DNA, 1930 bp, synthetic construct
  misc_feature 1..1930: note = Description of Artificial Sequence: Synthetic polynucleotide
  source 1..1930: mol_type = other DNA
gcccacctgtgtgcttctgttccaggccctctactggtctatccgcagcgagaagctcgagtgggccgtgtgagtgagactccctttcccctctccctctcacccctctcccctgtctttgggctgtcctccctctgtcacccacccgagagttagagaaactcagatagtgctccccttggagtgaggcaaagccagaggcagggctctggggagagagcatagaggaacccaagtaataccggagggccagaggtagtggggcgtggggtatggcagaattttcaggaattgatgggttcactgtgaaggaggactccttgtggggggtcctggggtgtggcttcccaggaaaagagaggttgctaaggctctgggaggcaatggatacctcccagttctctttgcatagtcagcacttccagcccgattctctgatgttcagggatgaagaagacacagccagacctgagaaggcccagccgtccctgccagctggcaagatgagcaagcccttccttcagctggctcaggatcccacagtgcccacctacaagcagggcatcctggctcggaaaatgcatcaagatgcagacggcaagaagagtgagtgtctgctgcccacaaacagggtggcgtgctgggagcagccctgctcagggacctgtgccgatgcatgcacaggtgtgcagagagacagcccgcattgaggacaggcagccagcccatgttccttcctcagtgcgtactgaacagtgaccatgtgctggatgctgtgtgaggcactagagggtaggtaggagaacccagacaaaacaggcctagttattcctgggccccagagtccctgtagtaaggtagagattagacaagtgtgtcaatgtctgcgaaaaaaatgtagcaagagctgagtgtctaggggctgaatcaagtgaggagaaaaaggtttttggttttgttttggaagcgggatgtggctacagggagaggtaaggcttctggtaagtgatggtatctgcgctgaactttggaggagaagagggtctggaatttggaagctgggcagagggcatcccccacagagaaaacagcaagccgagtttgctcagaacatggggtgtgtgaaagggaggtactcttgaggcaaaattgccagggcctgcatttgggccttattccacaggcagctgaaggcttttgattatggcaccaacatgtccagagtggtgatctcagcagactaatgtgcaagcacagattgaataggctggggcgaccaggatgggaactagcattggctgtgaagccgccggggccctagggctgccttttgtccaaggagcttagaatggatcttaccacacaagaccagggtggagaggtagggggaaaagagggcaggtggtgctcagagtggggtacacagggaagggcaccccaaagctgggctctgcgcccttgagcccctctagatgggtatgcaaggtcaagatcatcctgcagggactagaaagctgtctgggaggagctgtgtttgtgcctgggtgtttgccactacttggggtagtgggtgtgtgtttggagttggagagaagatgatatgtatgaatatctatatttggatgtgagtggttctatggttttgtttccagcgggcattgcctgtgtgtggagagactctatatgtttgtttacgattgtatgtgttttcttgtgttggcatgttctgcatttgtgtgcatcctggtgagagactggaggtggtgtgagggacagggggcatatgcacacttgcgtgtgtctgagtgtgtctggatgctggtgcccccacctacaacatttgtgttctgttcctggaacagcgccatggggcaagcgtggctggaagatgttccacaccttactgcgagggatggttctctacttcctg

SEQ ID NO: 82 - DNA, 1919 bp, synthetic construct
  misc_feature 1..1919: note = Description of Artificial Sequence: Synthetic polynucleotide
  source 1..1919: mol_type = other DNA
ctgttggacctgggacccttccatgaaatttattttcaatcttgaatgagatttactttaatgggaggccttaaaagcagatgccatgcgagttaaaatcacacagcttattgcatctatcagttccagtcagagctgatggcaaactcttgttctttcagttcagtaaccagagagtggaatctgtctgtctgtgtcttccataaccaaaatacatcaccccacgcaatgcctcctaataactggggctttgtggtcagggtttttgcagggcaggccccttttctgcaggcaaagtgctaatggccagcgcctacactgcaggcctctggcgcattctctgccgagagttctgtccgtcccacttctcctcactgtctagtcttcttctgaccctcccagcctggttcacgtttgctcttcgttaccctcttcctgtttctttctcctgtctctcctcccaccacaccatccctcacatgcaccatggggtgctccttcagattgtcatctgatcgagccacagtcccactcagcccatgtttgtcaggactctgccactggtcacttgtccacaaggaaccactgtctttgagcttcttcctccggtgctcttagcatctgcccacactgtatctatctgtgtccaggtcttgttttctgtgtcattgtttgatgaaaggcagggactcattcggtgagtgggtctcccctgcctctgccccacaccagcacactgctctgcccttggtgggcacccgttggtgtgtgttgagctgggtgttgtacctcggtgtctgcgtggagaaatgcgaacagtgagtgccacagcacagccacgggatggttgtcatcggcttcagaaggggaatgaaaggggcagcaccgtgggtgttgatgatctccgaggctgcctgtttagagcgtcccttccctgagatggaggcgtagcttcaccgtgtagtgtttaagctttaaaacgtgaaatgcagtgaggccgacagtgagttgtaggaagctcagaaatgggatgcccgcactgccttcaattcaccctccattgtccatcgccgctggcatacccaggtcagcgcctgcaggcccctgtctcaaaagatgtggccggcttcttgtcccggtactgcctgaagcttcacctcagcaccgctagcttcacagtggccacacccacctccactcagcagtctccatgctgtagcccaaagcatgtagtggcggttgagtacctgagtgggggaaataattaactgggatgcttttattgataagtagtcagatgcctgttaagtgacatttatgaacactcacgtagcactgctgcctgttagccaggcactagtcaaaggacttttgatgtattagctcatttaatcttcacagaaactagaagttagacactatcctctccactcccttcacccccagccccaaacacacacaattttatagccgaagaaacggaggcacaaagaaggtgaagactttgctaaagtcacaaaactggtataagcatgggctttgtgtgtgtccaaagttcatccctcaaccgtttctctctggatcaataattaaaaggtttatcaagaagtctgaaggtaaatggttcagtattgtcaggttctggataagtttctctgtgttcttgacttttccctcatgatgacaagaaggctgccaccactccaaacatcacagcctcacagttgtgctcaaagggagaaagaagaagggacggccgttctcctttgagcacactgtttcactggcttcctgtgggttccactggcctgacttgatgcctgggacactttaagcatctccggtgctatgcgggctgggaagaagtgagctgtagaggcagccagtgttactctctgctcctgcgctctgtgtgcagc

SEQ ID NO: 83 - DNA, 1897 bp, synthetic construct
  misc_feature 1..1897: note = Description of Artificial Sequence: Synthetic polynucleotide
  source 1..1897: mol_type = other DNA
ggtatttccttgcacttgtttatcctcctctccacaaatatgtggcagggtgtaaatgctcactatttcagtacaaaatcttaactgtttttgtttttcttccctttttttgatggacaagaaagtgaaatgcaaatattttccctcactttggattagtaatccctccctttcctggaggaaagaggaacatgtttttcaagttatgaatctgatgaattataaaagcatatggtgaaagaacaagagggagaaatatccacccaaactagagatgactttagaggtcctgaagagaagagatctgtaggtctagaagcaagaggacccattctctgcttgggtcattactatgggaagcaagactccaggcaggaggtactcagttcatctaggaaaacaaagccctaggcaatgggttgcagagctttgccgaatagtccagtgtcctaaatatgtcacggaaactgccagatgctgccagacctgccagtattgtgcagacacagacaatgggcatgtcagcattgactgatgtgggagatgaccagtgactaaggaaggcctccggagccttggcagagtaagggagtgtgactgaggtgggacccaaacctactggagtgatttacattcaccttcctaccagcctaatgcgtggcagcttggagtcaaaattaggtggattcataggtcataaacgttatacttctctcacacttgagctttccgacttaagagtcaaacattataatacaggagattcctaattcagggtgtagatctagtagttgagagactacccccggaggaaagatttctctgctcaccattccttggttacccttccagatttattttggccacactccaaccatgcttcagcctctcacaccacactgctcaccagcctcagccttgattgtcagccccagaagctgggccaggttttcagggttgggcttcagtatctcctctcttgccctgtcttgatctggttcatctcaagaacaagacacttgcaggatgcaaggagtttcacctcttcagtttcacctttcagaagctctggggtggctgtgtgcccccctgtgactctcaaatctgtatcttcagccctgccctcactacagaatagcaactcgtatgtatgagaattctactggacatccccttgagattcctacataaaaatcaagaatcagatactaaaaacgaacctattagctcatgctaccctgccctttgatgtcaccatctcagtgattagaaccacgacccagttgctttaatcaaaaacccaaagtcactaattcctttaaaatgttcttaattcactatcttctccagtcccattgctgctgagttaggtcagggcctcatcatctcctgtttgaattattacaacagcctccagtttgtccagtttctatatacactccacaaagccaaactgatgattctaaaacacaaagtgacggtcagtccccttttcacactcttcagagatgccctactactcttgttgtatgtcttacaaattatgacccctggccaaatccaacctgcagcctaatattgtacggccctcaagctaagaatggattttgtatttttttaatgcctgcaaccaaaacaaaacaggaacatccaatggtggccatatctggccttcaaagcctaaattatttactagctagtccttcacagaaaaagtttgctaccccactaaaatttagatagccccactctggccctcctataaccacttccccccctcactcaggacaggagtctgtatgggtccaaagggctgttcttcccagagcctgtgtcctccctacttacagacaacactcctggaacacccagcccaaagaatctgagtctgcttcca

SEQ ID NO: 84 - DNA, 1896 bp, synthetic construct
  misc_feature 1..1896: note = Description of Artificial Sequence: Synthetic polynucleotide
  source 1..1896: mol_type = other DNA
aaccacctccattggctggagatatgttagatatggacataattccttggtcacagttataacacactaggacattatgtataaattcctacctagatcctgctctgcaatgctcagtctgacaaacataccctgggttttgacaattatattatgctttgaggtctctctgatttttggcaccactttgagctatgtcttcactcagtcaccttctattattagtccagcagctccaataatgatttttctcttctacggtgacccaacaatcctgcagccttgttccagactggcctgaataataagactgtgggtagtggggtatgaaagtttaagcagcactcagaattcttccactttgccagctttaaccctgcctttgacggatgaaccaaaattgaatattactggagctgtaggaagggcatagtgtctcattatttctcttcctccctccgcaagagagcacgtggttgaagggggggggctctctgttaagtaccagtaactttcaccttcttaagctttgatttaaagctagtttctagtcctgcaaacttaaaacaaagagcagaccaaccaaagaacaacctgatgataattagatggctctcaaaccattaagttgcctcttaaaattcttacctgtggtgagtacacaacattcaacaccttcactccacatgcagcctctcactaggcatttataaccaattaccttaggtacagatttattagagtggttgagttaatgtgcctcattaaaacctcatggagataagtaactcacagttccctgctggctagaacatcttttctggtcaggttttcactgccgacaggcaatggaaagttgattaaccagcaaatttgacaaggttagatataactcaaaagtttaaaaacttcacaggaactatgagactcatggtctgcctgtcattctgggaaatcagaccttttcccaagaaaaaggacatacagggaagtgtttgctagagaagggagtggtcaaggaaaaatgtcctgtggtattttttctgtaggtaacagtatggttctgggaactattcccaggcactctatttccatctccctgctgagcaatagttggaggtcacagggagatagaggaatggcccccagataagaaagcatgagtagctgatagggagggtgatatcaatgttttatcgtattttttcagagataatgaatctgaactttggagctacccagttctcagttatgcggagtggatgagcagaatgaagaagctaagaggtatccagggaaagatcacttcttagaacgcagtaaactccctaaactggtggtagaggagacaagctagattttaatgggaaaaaggaggctccttctatatgtcacttagtaggagatgggtcatggcaagccccactggttgacacaggtagtttctggcctgacacgtgctgaagtagcctccatcttcaagtagccagcacggtatcctgcaggatacagtccataaggtggatggttgtaacttgtgatggaagtagttccaagcaatcttttcaacaggtgtggaaattattaattatctactcagtgcatggtgaagagttaggtctagggagtctagagagagaagtgaggtgcccatactaggaagagttacaggaagtgacacagtctggctctgagaggttgttggaagaaataattattgagcacgtgaatatacacatatttcttaagcaatagttttctttcattaagcagttactttcagcatattacatacaacttcccattttatattcacagcgattttatgggacaagtattttccaattatacaaaggagttaggtacaaaaagactaaacatcttgctacccaaaaa

SEQ ID NO: 85 - DNA, 1896 bp, synthetic construct
  misc_feature 1..1896: note = Description of Artificial Sequence: Synthetic polynucleotide
  source 1..1896: mol_type = other DNA
tgtcttggaccccttaagtaatctgagctacatgttgtcacagggaaacctgagattggtctggcctttctagggctgttgtaaaggttaaatgagatagcacacctgaagcatttgcctaataatgccaagtacatagtatgtgtgaaacaaatataatctattaccattataattgattatgaattgttaaaggtacatacctatattgtacctttaggttacacgtggaccaaggtaatagttgaattaatcagtctgtgaccagaatgggtaagaccaggtgaggaaatccatctgctcaccccaaaatgccaagccccaccagaggatggtggcttaagcagggttcattcctttccagatatgccccacctgaatttcacacatacctcatttcacctgaccctcatcacaattctttgaaacaagcattttttctcccagtttgcagatggggaaactgagactcagagtttaaaggatttgcccaaagtcatacggcccggaggtgagactcccagagcttgcaccttcttttcccagcttcaagcctaggactcttgccatggtagaccagctgccaaacaggccaccattttaccaccctgggacaaacctgtctttgagctgtgcatcaaagcagaggcatttctcaaaggcgggagtgcctcacccatggaggggacagcaggtgctcactgtgctcacaatggctcctttcatgccagcccctgccttcatgggccaggaggggtctgttttcacccctcaggccccccaccttcattcccctcctcactctttcaaacaagactctgctgcttggcacacaccatggcttaaaaacagggagcaggctcaggttgacaatgccaactgcacagtcaaccttcaaactccagcaggcatccgccctctgtggcagccagattcagagactccggccagatctggcagactggtagacagccatagaactgcaacctagggaggggcaaaccaaaccaagcagaggcctggggttgccatttgcaagataatagctaaagcagcttctgttaacctcacagttttagagcccagtgcctttctcttgtgccatcctcagtatacccagttcagagctaaactggaagcagatgaagttggttgcatttctttctgttccctcttggctaggatccagcaccctctagctccatgctgccccacaccccaccaagctgcatagacttctcagcccaggcactgctgcctgcccaatctttacacttcagtctcagtcttcacactttccccatccctgattggaactccactcagttatgacttccatgaataaacaccagaatccagatagcaaatagctggaaatcctactaatcccatgtccctgcctcttgttctatgcttcctgagctatatgtatgtaccctttgtaagtcaaggatcataattaggtcaaatagggatttagtcattaaacttaagagcatcaaaactgggtgtcttcataaaaagcaagacataaagaactacttttccatcaaataccaagcccacgtttttgtatacatcaaaaatacaagtagattcaagaaagttatataagtaaattcacagtgatagagctgtaataaatatcaaatttaaaatccattgagatggaaaattgaaactaatatttcttttgaagttaacagcgtggaaggctctatgctgtgtcacctcaggaacagaatcttggggtagaaaaagctgctgatttgacctaatatgcatgatttctttttgttttgttttgtttttgagatggagtctcactctgtcgcctaggctggagtgcagtgacatgatctcgggtcactgcaacctctgcctcccaggatcaag

SEQ ID NO: 86 - DNA, 1893 bp, synthetic construct
  misc_feature 1..1893: note = Description of Artificial Sequence: Synthetic polynucleotide
  source 1..1893: mol_type = other DNA
agtcacaggtggcggaatgagcggcagctggaagttctcatactggaagatgctgttgaaagcaggagcactctgcgagccactgcatggcctatcgctctcgctgctgcgattctgggagagttccgtgaggagagccagctgcaaaggaaggacacacatcagctaaggtttgtggggagcagagggaagagaggctcctgaatccactgcttcagatacatgagagacagtgctgtgttgcaggagtagtaacatgcagggtttgaatcttaggtccatatatcacaaacgagcagtgtgactttgggcaagttcacttcattttttagggtctaaatttcctcattcaataatgagactggactggtttgctcccaagggcactcaaactgtgctctccctggcactggagagctctcccaccctgggctggccctgtgctgagggctcctccagctgctgtggatggccctgctgccacccttctctccctgtggacgcgccctgggctgaggagctctgttctcagctctgcttgctccaccctctccatcttggtgcactctcctcggggtgaatgactaattatgaccactggctctgacctctcttctgtaacctggaaggcctcaaacaggcacccagctgccaactcaaactcaggggttccagagtggaacccctggattctaccttctccttcaagtgagtcctccctgctcccagcttccttattcccaccaatgacactagcagtaccctcgttctgtcagtggctcaattctggaagacctgccaaggaggacagaagggtaggaggagatgctaatgtcggcctgttgggaagccagtgctctgccactcagggggaccatccctttcacctaaagaggctttctgcgaaagtagggagctggcagcctggctcttgaggtgcccttgatggtcagaggagagacgaattctacacccaaggtccttagacttcctgcctgattagggtctttgcctgttgcttcccagaacattgtgagttaacttccaccccacagagctaatgtgaaggagaactcagagcccaggtcaaaatggtccctaataacagtagttgggacctgtgggatgggccaccgtgtccactaccaacactctaagggaccctgcgtaggctcacatggaggctggtgaaagcctggtccatggggagtgtacagctgagacgagcgggccatcagactcctcagggcagccctgtctgtgtctaccaaacactccaggagtccgaggggatgtctaacaacctctggtgactgtatcaagtgtctttccatgacaggcactttgctagatccttgacatgtgtgttatttctcatccttcacaacacagtgacttgccctcggtcaccagcagtgagtggcggtgtgggattcacccgccaggcaccatgtcttcgaggtgccctccgacctctggcaaagggtttttccctcacacaggcaatggtggcacaagctcacatgtgtccacgtgtcacttctgtggaaaactcagtaccagtggctgtggtaactgggaagacatctgaaggcccctaagttctaagtgtcaatttatcaaaagtggtccaggtcctggcccagagacacatgtatggtctcattcacaactcagtaactctgactcaagcactactccaggggccaagagtccactttgtgccacttccttcttctgtaaccctctcagttgcccatcagcctgcgacgttctctgcaatgactgttatgtatgatgccttgaatagaatgagccacagacgctcaactcaatgctttcacatcctgacactgtgaggtgggaagatcaattgcaaaaaaaaaaaaaaaa

SEQ ID NO: 87 - DNA, 1890 bp, synthetic construct
  misc_feature 1..1890: note = Description of Artificial Sequence: Synthetic polynucleotide
  source 1..1890: mol_type = other DNA
gagacagggtttcaccacgttggccaggatggtctcgatctcttgaccttgtgatccacctaccccagcctcccaaagtgctgggattacaggcgtgagccaccgtgcctggccctggtttcctttttcttagcaatcttttcttcaatatactttttccaactctcacattttactatgagcagcaagaagaaaccaggctcttccttcaacattttccttagagatctcctcagctaaatatccaagtttgtcccctacaggttatactttcgacacaacaagacacaattgcaccaacttctctaccatgttgtggcaaagatcatctcctgcgttttccaatagcatgttcctatttccgtctgagccctccccagaatcacctttaacatccatatgtctaccaactgtatcttcagaacaattgagtcttcttctgacataaatgttaaaactctctctgcctctaaccgttacccagttccaaagccaccccggcattgtcaggtattggtcacagcacttcctttctcagaaccaaaatctctcttagcctgctcaggcttccagagcacaggaacacacaccaggggacttaaagccaaagaaacccactgtcgtagagttgtgaggtctagaagtccaaaatcagagtgttgtcagggccaacctacacctcgtgctgtaaagggggccctcccttgcctcttcctcctcctggtcaccccaggcattactcaccctgttgacgggtcctaatctctgcctctgacttcacgtggattcttcctgtgtgtgcatctgtctccaaatgtccccatttcataagggcacttctttaggcatttcattaaggctcaccctagtgatttcactttgaattgtttgcttaagatcacattttgaggtagtgggggttaggctttctacatatctgttttagataaaaattccaaattcagacaaaattcaacctatgacaaagtcatgctattgctattacatactcgacctataacgaagttacactattaactcactactacatactcagtataacaaactcactctaatactcactactacatactcagtataacaaagtcatggtaatactcactactacatacttggtataacaaagtcacgctaatactaactactacatactcggtacaaagtcatgctaatactcactactacatacttgacctatgacaaagtcacactattaccactgcccaaccaacctataatgcagtcacactattactcactgctacacactcgacctataagaaagtcatggtattaccgctgcatatccgacctacgacaaagtcaccctattactcactgctgcatactcaatcccagatttacaatcggaagcctctgctggtgaaaatatggaagtcaatactgaatgtccctttctttgccataaaactgccatcacacagaagagagaacttaccaagcaataccaacacattcattctccaataaaattattaatttcttcattttgtatacattcttcctgtcttttttaagttccattccatatatattttattctcaataaaagttttatttttaatttttttcaaactatctcagcaccatttgaagttttatactttcacatcagaaaaagtccttaaatgcttaaagtcagaatcatattaggtgacaacctaacctaacagcataattggaactaagtcaaatatcatgatgctctaaacgtcatcaacctatcaacactccatgctccttttgagtagttcataccctgcaaggatctggtgggatgttttctcaaggaaggaaatgtatctgtcagttacagattctcattcgatgcaataaccttctttctca

SEQ ID NO: 88 - DNA, 1887 bp, synthetic construct
  misc_feature 1..1887: note = Description of Artificial Sequence: Synthetic polynucleotide
  source 1..1887: mol_type = other DNA
ccccagaccaattaaattggaaactctgggaatgagaccaaggcatctgtattttttaagcactgaggtgattctaagatgtagtcagcgtaaaacccactgctttaaactcaactatgtctaagccatgtccagccttctccctgtccccaaacaacgtgtaagaaatatgggtgcaaaatagtttcttcttgaaactgaaatttataaaatcttcaggtcctgagaccaagacttgtcttctaaaccaaggtgtgtagctgaaacctcaaaaaaatgtacccaactattttaactgttggagttaaatttctggagtacccaactattttaactatctggtctttgaaacatttgattatgaagactggaggctaacagggaacagtgaaaaatgtaccagagctgaatgacaggtaagctaggtctggcaatgtctgtttctgacactagtgtcaatggagaaaagtctgtttgaattttggaacttcatttttgtcatctgtaaatgaaatgtggaggttgaaagtctttcaaatggaaaatatcaggttgatcaaagatgtaggaagtgctactccctgttaagcaccacccatctaagtatagccatgcgccctcaagaaataaacataaaaatagtaaataaataaaacttgcccttcccagaattgccaaatatttggagagaaaagctgaaggaggtttggatcaaatcatccagatacaggaacttcatcttgacactggacaatagaacaatagagcaatcactctctttgtcatttcagccatgataagggcaggaatctttctgtctaggtagggaacacaaatccctctgagccccctctccttcctctgctataaaggatcgggctcacccatgagttgactgaagacctctagtttctacatgaccatcttcatgacctgttgctataactgttagttctgaatcattcagatcagcttgggcacgacctatacttaagcagttagttttctccttttctgaatgacaaatagatggtgttacagttgaaaatatcctgctctcctgcctgactcactgtcaaacaccgtgctggattcttctctctaccttgaacttggcacacaattgtttctatagttaaataatctcctaaatctctttaacctatatctcccttttcatctccattgccgctgccctggttcaggtcctccattcttggggaactttcttccctggacaattgcagcagcctcctgatgggtggatcacccattcccacccgcagtgctttgtgaatcactgacacatatgaagcatcatgcttggtgctcaagataaatcaccctggtcttgccttccaggagttcccaatctagcagatgagacacagacaaggaaatcactgccacgatttggtaaatttttagctgtggtatcaaaaatgtggctatttctggctatcaaaatcagagaaggcttcagagcagagggagtgtttgagctgaggggcattccaaaaagaaggcacagcatgtacaaaggcctgaagttagaaaggatgagaagtcattatcagattgcaagtagctcaatccagtgggcaggcagaggacaacctgttatgaccaggggctaataaaggaggcagaaggcatatccttaagaacaactacagatccacattgcagtgagaaatttggattttgtcccagggtccgtgaggcgccattggaggatcttaagccaccagggtccatgaggtgccactggaggatcttaagctggggagtcacgtgattatataatactttagttttagaattctgtcttgttagaagatgggaagatgccttgaaagagataaagcatgggagcaggtgatgctg

SEQ ID NO: 89 - DNA, 1882 bp, synthetic construct
  misc_feature 1..1882: note = Description of Artificial Sequence: Synthetic polynucleotide
  source 1..1882: mol_type = other DNA
gggatacatgtgtggaatgtgcaggtttgttacataggtatacatgtgccatggtggttcgctgcacctatcaacccatcatctatgttttaagcccctcatgcattaggtatttgtcttaatgctctccctcccctttcctcccaccctctacctctaaacttttatagctgcacatttatcttcatttataccactcctatactaatttaggactggtcttctagtcactctgaattcttatacatctgatctaatctacttatttatcacttttattcttaaggcctggctgtaattgtaacttgctcccttcaaaaactttcaatgactttaaattacctagaaaataaagttgaatagtcttaatccagcttttttaggccttttgagttttaggtgaactccctttttaaaggccaaagggtctgtttggtctcaatctgcccttaacctgcagtgtcatcttggatcagtctgtacgcttggcagtgacaatgactactctcatggtttattataaggattatttattttaattcctagaagtcctggctttgaaagcttcattatctagcagaatagactttggaaaattgatttacttctctgggatttcttctatttgtttgtaaattgatgtggttcacaaatttgagtttgtataagaatcagctagagaacttgtgaaacatgaggactttagacctcatcccagacagagattctgacgatattttactttttttaaaaaatgaggcataacatataagtgcataaagtatactaatgttaggtgtatatcttgattttttacttatgtatatgcttgtgtgaacatcattcaggtcaagacacgttagatagtccccgacttaggatggtttgacttaacgattttttgacttaatgatggtttgaatgtggaacacttattgcaatatgtgatgaattattcaataaattgcatgaacttttcaacacttgattataaaacaggctttgtgttagctaatttttgtccaattgtaggctaatttaaatgttctgagcttactgaaagcagactagactaacctatggtgtttgagaggttaggtatattacatgcattttcaacttactatgagtttatcaggacttaggcccatcttaagtcgagaagcattgtgtgaaatatttccaacaccccgggagttctccatgccttcccagtctgtgccttttccagagatataatagtttctaaccactattttaacttctatcatgattcctttttagctatatgaattagatgaattttggtgttccttttaattctagttttctttgagtctcaatttctaattcagatggagaaataaaactattttgagtaagttcacattgtcatccaaaatttagatattttctgccatcaacatctaccccaactttaacccctcctttggttcttcacctccgcaagtcttcatattctttcttattcttaagctctattgtggctacttcccaagctaggatagaaataaagaatactaaagttacaagtcaagtattctaaccccccttacttgcaacaattccttctacaacatccctggaaagtggtcttttacctctgcttaaaaacttctggtaactgagacctgcttatgtcaaattattggacatttgtctttgctagaaattgctttcatatgttgatcattgtaaaatattatttggtatctttgctcatagttatgccctccagaataaaaagaatatccagtcttttcttctttatggcaacctttcaaatatttaagacagttgccacatatactctaagactttttttttctctagttattggagtcagaactcccagcacttt

SEQ ID NO: 90 - DNA, 1876 bp, synthetic construct
  misc_feature 1..1876: note = Description of Artificial Sequence: Synthetic polynucleotide
  source 1..1876: mol_type = other DNA
cactaacaaagatagaaaacacgtggtgcaacttttgaactcaagacttgttcttccttttcaagatttgttctcaagaattattaatgtagaaaaactaaacaacttgtcctgggtccatgttccccaggccatggctatattccccacccattaaagggagaagcagatcccatttgggcaatgaacttaaaggccttggcacttcttgtgtgtagtttcattaaacattgcagcagcagtacctaggggagcagtgtttttgcctctttggacccaataatgtgtaaattctgtcacagagaaccgtgcactgagtctaaacactcatattttgaaaatacatttttacgttcaccaagttctctatcatttctaaatttttatagcattactatcttctcatatttgtcttctatcttctaggctactatttacatttacccctaccctggattttagacaataaataaacattggaggcatgtgctgaaagtaagattttaccaggcaaacaaggagaagagttttcatggtcaattgttttttgatgtttgttttgtgctgaatcaaagaagcaagaaagagcttggtgtgtccggggatcgtaggtggtttgaagtgactagggcgtgattctcaagtgcttttcttcatagcaccccagaagtgtgggtggcactctttaagggataaaaagatataaggtgacattaaacaaatcagcaataatcataacccaactggtactccttcatagaatatttcccagcatatataaaagtgcccacagttatctcaccacacaagtagttactcttcagcaatgtggttgtagtggagtagtatagtttactcccctgatgaggtatactcatgagccttgtaaatctcactttagagtacactttgtttagcctcttactggacaccccatatcctctcagctgaacattccatctgacaggccatggcaaaaaacagtgcacattctattgtaacaaaaattaagtgtgcacatttgtcaaaatggggtggcatatcttgcagatgcttggcaggatgcctgtggggaatcactaggctccaggagaggattgtatgggggaatagagtagatgtgggaggaaaagcaacagcagcaataaagatgacatccagggtgtattgagaggctaatattgataaatcttcatttacagtgtttctaatcctcacaactacaacaagcaaacttgttgttattagtttctttttcggaggaggaaaacacggctacaaaggttaagtaacttgtatgcatctattcaagtaataagaaacagaacaggaatcaaactcagatttatctaattccagaatccaggcttttccccatgatatctctaaaattaggtgatactagatcaaaagtatcctcatatgctatcacactgggatgtttaaatactacaatcaaaatttcctataagtgtgtcctgtgtgggatagtaattcttcaggatgggaaatgttgttactctaaattaagggctctggagcccaggtaggcttataaaatgctggacttcactagccatgcacacgctcagggtgcccatctcttgaacaatagtttgtatttatgaaaccactgtttggtgttggggtgtattctggtgccacgaaatagagcttctgtaagtgtgatgctaagctcacccattcagagattggactcatgaccttaatctcattagcaacgccattctagacccatactatagcttcttaaccaatcacagtgatacagctatacttcgaggatacatagcaaattccttcagttgcatgttttgttctgctttgcttttttaaaaatctctttttaaaccaa

SEQ ID NO: 91 - DNA, 1872 bp, synthetic construct
  misc_feature 1..1872: note = Description of Artificial Sequence: Synthetic polynucleotide
  source 1..1872: mol_type = other DNA
ggagggggttgaaagaacttccttcctgatcaaccagagttggcaccatgcatgttatggaaaagcctgtccacagaaagaatggagccgcgttgcagagtcgggtagaagtggagagccggcagtccattgcgggaggcagggagcggtgtttgcccttgaccctctggtgcccttgccttcttggtgccctgtggttggcagtgtaagcttgcctctgcatttgctcggtataccctctcacaagttgggaagctgtggcagctggggctgaaagaagcgtaaccccacagggcctggcaggacagcagaatgcagaagagcggcaggtgccaagtaggtctgagagggccatagacagccccagaggaggtcctgcctgtgcagtggtgtggcagaccctatacattttcatgggcctggagtggggagctgaggttgactgcaggaacaggcctgtgagagaaccgggggtcttggatctggaaatgtcccagagacacttgcctgggagccgggatgggggttcagctctatccaagactttagtgaatggtctagttgggacccacagacagtggcaaggcagtgctccccatgtcctaagccgaggctggatgggacattgcacgtcttggctctgtacaggccacgtgaccactgagaagtggaaactcccactcagggcatttgcctagcacccgctcctcctcctccacaattatctctgtcccaggaggtagaggattggggggggggggcggtcttcggaatcgatggtgtttaagcccacagtggctaagaaatccctgcatttgactcggtttacttataagtattaggattcttctttggtgtcaaacagaagaggggctgagcatcagaaattaaatcaagtgacacccaaaacagagatttgcttttgcatatttgaatctgtaggcatgaagtgtagcccctgggacctgcatttcacagcaccccccatctcctcccccccaggaagatggggagggtcctcagaccacactcgtgaaccgtacttagcaggagaacaccgcacagaggcatggggctcttctgagagctgaagcggcggcatgtggcaaaggaaataggtgttgcctcttcagaggatccaggtgtcagcagttacaggagccatcttcagctccgctgaaagaggggcttcctgaccactgcgttctccatcactggatggatgtcctgccccaggatggagggccatgtgtcaggggttgcaaagaagaaggatgccctgttagagttagaggttgagcaaagaggcttctcatatcctcttctaacttagagatcaacagctacttacactgagctcctgtttgtgcatctctagaatgaataagaatgaataaatctaagaccctgggggctcccagttacagatatgaaaaagttaaagtgacccccagccctgagcccctgcaggaggtggggattaataatccctaattagcccatgcaattaccacaacagtccagattttgaaactattatcctgattttacagatgatgaaacagattcaatgacagtaattaacctgcccaaggttatgcagttaataagcagcagaatcaaaattaagtcccgtctctcacgcccttcccaaacattccagtcctctttaaataatctttattctaagagggaaattttcagaaaattgaacttttacaatctttccatcacactctgtggacgtcaaagggatttccatgtcaaaatcagctccgataaagcttcaactggtcacgtgcaaaagttcaattgtttctgcgtatttttttccacatctggaattcagctctctttgcctttcctccccag

SEQ ID NO: 92 - DNA, 1871 bp, synthetic construct
  misc_feature 1..1871: note = Description of Artificial Sequence: Synthetic polynucleotide
  source 1..1871: mol_type = other DNA
gctgcacacagagcgcatcagccactgtcagctgctcattttcccaaagcccacaagcctcagccacgctttgcttctgcaagacgcttcttcaccttttcaataaacctgcctgaatttaaactgacgggggtttaattctccttcatcataaatgaaattcttcaccgcaataatctccaatgaattttgggcacagcaggcaggcccatttctgcttctgttccactatctcccctgtaggttgaaaaggaggaagtactgaattacctccaaatgttcctctggctctgatattctgttattctggttccttttcagctactttgtttttggtagcatgtatcctaaggcatccagttgaacaacctttgtctactgtgtccaggcattcctcgtggtatttcagataagacactcttgggttgctgaactcacaaccactgaaccaattctatgaccatctgtttcatggccacatgtttgctcattttatatgtatataaagggaggggacagacagcaaacttgcgtgttacaaattgtatcatcttaaaaaggaaacaaggcaacactttgcaataaaaccttaagatgcatgaaatttaagcctaatgcaataaaggatgcccataaaattcttatctaaagaatgtttcgaaaattgttgtacaaggacatcatcatttaaagtgatatgaagaaaccttctcagctaagcatatgggctagattagagagaaaaataaaggacccatctctgccctggaaaaactgctggtagcatctttcaaaaagctctctgtgtttgagtacgcaccttgatccataggctcacatttgatcccaactggcagctgcttcttggcattaacattggattcccaacaagtaaatcttaccaagatctgactttctgcagatataatattattttgtttgaccatccttatcttcaagggctaccaagaaggaaccaagaatttatttacctccccaagggaaaaggttttaccaatgagacactttctcaccatgaccccaggaccccatatgccctgttcacttgagtgccctgtgtggcctgacagaagctcatgctggtcacaggattccttatatgactagcctccttcctgaatcccaatttcatggtggtggtcatgacaggtgtcctgtatcccatgctcatgtccctgaagtcaccagcctatctccagttagaaaaaattacatgtatatagagaggcctctttggaaggagcaaaaactttctcaccttcgtacactaatggttggaaggtacaacagcatatgcactttgggaaaaaatatctggcatattcttacagaaacaaacaactacctattctatgactcagtaattcctaagcatttatccaagagaaactaaaacgtatgtccagaaaatcacttatacaagaatgttcatagcagttttattcataatacaaaaaactgaaaacattcaagtatctgtcaatacaagaatggatcaataaactgtgatacactcattccatggaatggctaaaggaacaaactggtgacacacagaacaacaaggatgaatctcaaaaacatttggagtgcgatagaagccatacccaaaaaagtgcgagaaaaaaagataaataataatggttccaagaaatgcacagcagacagcccagaggcaaagacccacaggacggcgggccggtcccaggctgtcgatcctaattaagaaacttctgctggattttgcccagctccatttccaaactattttgggtcagtgacttctttatcccttccatgttgcctcattttgaactagaatcactgtaagtgggcgctctgtgtgcagc

SEQ ID NO: 93 - DNA, 1864 bp, synthetic construct
  misc_feature 1..1864: note = Description of Artificial Sequence: Synthetic polynucleotide
  source 1..1864: mol_type = other DNA
tatgtggaaatcattactcaagacaattaggatggctaagcctgttttgacagcatacttggaaagagaaggatggtgtcagacaaagatcagaaaaccagactcctaaattaaagaaaaagaagaagtaaagagaaagttgaccatgaatcagttcaatgatagattgatggatttgaaataggcctttgaaagaaaacatcagatgtgtactatcaaactgtgtaactgtttaggatagaacttttcactgtgctaaattagatcagcgcataattttcagttaatttttgactgatggaaatatcactttgatgtgttctgctgtatctgacttctcctcacgtttggatttctgctactgaaagtgcactccagggaccagagctataaccaagtgccaagccccattccaataacaaaattaaccattatggctctttaggaatctccaagatagtcttcaattttaaattatctcctttcctttctgtgcccctacacatggtgaggccagtatttatgcctggctttcccagataattgctgggtggctactagccctagttgagacaatggtttagaaaaagcctcttactgatttcagaaagtctacatataccacagaagaaatactacttgctgtggcccctacctccaggacttcacggaccagttagctacagattaaaaaactttgtctagggagacagacttaatgctgatccaattttcttcaagagggaaagtccgagtccaaatatctgttgtatctgttgtggttaccaccttttgagtgcccttcctccaaggtcagtctccctccattgcattgtccccagttatgatgaaagtttctccacaggttaaaaattaccactcaatctacagcctttgggacatagaggaaacttctgtggcttgttaaatcactgtatttcggtatttcacacagtatatgctactgacatttaatcagaagaaacaacttttttctaaaactaaattgttaataaggagattacaactatttgacaagaataaaacatagtctaaagtttggaaaaagtgctaggggaaaatggagtaaactttgatgtagtcatgaggccctttatactcttgttgattaaaatttgcctgataaattgctttctggaaataaaatttaattcctccatgccactcacactccccagtgtcagggcattcaataataaatgggatctggataaaatgcattctttaaatgtaattattactttaaatatcatataatgattatctcttctttaaaagacgcttttactttaagacatgcataccaaaattttatagattaaataatatgtcttggatttgcttcaaaataatgcttgtgttagtaggagggaatatgtggaagtatagcaaaaagattgagtgggagataatgtttgaatctgggtgatggctacttgcgtgtgtattataccactcactctacttttgaatatgtttgaaattttccatcataaaaagctcaaaaataatataatggtcacccttagagtcagtcagttctcatcaacattattacttttctcaaaggcaaatcatttagaactacaaagcaactgtacattatactcactactcacctctgaccccctaggtcttcattgggcaagcaatgttggcaaaaagttttaactttccagggaaaagcttcagggaattcagcttgacagggtgagtgtagaagaatttatactaaacttttatgtgtttctgcagaatcccttcctgctggatcaagagacctatatgttcatatgccagaaaaaaggtgaggctctaaaaagagaggagagattatggacag

SEQ ID NO: 94 - DNA, 1864 bp, synthetic construct
  misc_feature 1..1864: note = Description of Artificial Sequence: Synthetic polynucleotide
  source 1..1864: mol_type = other DNA
gggtttggtcccagccccagagggatctcagctgtcgctcggggcccgacctatctcggtccatctaagggtccgaggcacagccccgccaagaggccacaagtgtcagctgcttccgcgggaagggtgagggctaccggggcacagccaataccaccaccgcgggcgtaccttgccagcgttgggacgcgcaaatcccgcatcagcaccgatttacgccagaaaaatacgcgtgcaagtgaggtgggcgggggggcgggcgttgggacgtgctgctgcgggtgagacgggaggagggtagtcacgggcttagggctggaggctggcgggctagggctgagtgcagcgcctgcttagagaccttcgggagaacttctgccggaaccccgacggctcagaggcgccctggtgcttcacactgcggcccggcacgcgcgtgggcttttgctaccagatccggtgttgtacagacgacgtgcggccccagggtgaggcccaagcttgggggctacagagccggggctggaagcctggaaccggagggccggggcgaggtctcggcctgatggctgcccgcaccggccgcagactgctaccacggcgcgggggagcagtaccgcggcacggtcagcaagacccgcaagggtgtccagtgccagcgctggtccgctgagacgccgcacaagccgcagtgagtccctggtgctcccggccccgccagggccctaaccctggggcggcatgctttgatgtctgggaccagagcttggaaatggttgagactaccctgccacgatttcgctcccgctcccgcctcggttcacgtttacctccgaaccgcatgcacaactggaggagaacttctgccagacccagatggggatagccatgggccctggtgctacacgatggacccaaggaccccattcgactactgtgccctgcgacgctgcggtgagcactagtgacgcttgccccatgaccctgcctcagccctcaccaccaaaggctggctcccttaaccccagtgaactttgtctttcagctgatgaccagccgccatcaatcctggacccccccaggttaggagttgggccagttatgggtcaggccctttagcccacgacatccacacagtctgggtttcatccagcccaccccatcctacagaccaggtgcagtttgagaagtgtggcaagagggtggatcggctggatcagcgtcgttccaagctgcgcgtggctgggggccatccgggcaactcaccctggacagtcagcttgcggaatcggtgaggcacaacggcctgtctcccacagagaggagctgaggttgtgtcctctgtggttatgccactgggggctgggaatctatccctgcccccagaggtcctagccagaagatggcaggtctagcatctctcccaggagtctgttccctgtcctaattccccactcctctaggcagggccagcatttctgcggggggtctctagtgaaggagcagtggatactgactgccggcagtgcttctcctcctggtgagcctcccttgtgtttggggacccagtctcatcccaccttcccctttccccaggcaagctaacaagtgagccttggggcaacggactgagagtcacaaatgacctagcagagcttctcacccagccatatgcctctcacgggctatgaggtatggttgggcacccagaacccacaacatggagagccaggcttacagcgggtcccagtagccaagatgctgtgtgggccctcaggctcccagcttgtcctgctcaagctggagaggtatgtggacaacctgggaggatgtgaggtggggctgagccttgtggcctcagacc

SEQ ID NO: 95 - DNA, 1838 bp, synthetic construct
  misc_feature 1..1838: note = Description of Artificial Sequence: Synthetic polynucleotide
  source 1..1838: mol_type = other DNA
aggatgaactcagaaaacctgcacaacaaaaaagcctctcaagcttagcctccttttctttcttctttggggttattctctcagccatcacccatagcgggaacttagccattaactctagggccatatttatatagtgctgggaacataaaggaaaaaaaaaaaagaggcttccctgttagcttcagccagaacaatcctgggctgggagtctgcttggactggctttgcccttggcctcatcgcggtggccagagagtggaggtgttgtgttcatctcagactgagcctgagcagtgtgattattcatttacaggaggaaagggaggcgtgttgagcaggcaaaagggttttaaagcccctggagacattccaaatataccaaatgataacttgatttttggcaatatgcttctgtcacaatgttaaatattcatctcactcccaagtgccccgtgtctttcataatctaaatctacgattggtacctcaattattattttttgttcttaattacaatcaatattacttgaggcttcctcatgattgctttatttcttttttatttgttcaacctcagtacagtttaatatttattgcagatattgggactggctcactcagcatctcttccaaacgcttttcagaatttctcacaccactgcagagtcaggaaagcaaacactttattttccagactccttgctcctagattctagatgtgctttaggctctgccaaacagtagcactggtgggagacttgaatttggaattgagttcggtagggagacaggcagctcttgggctattcattttgtggggaaagattgtggcacacatggtatggttctggagccagcaattgtggcagaggctgcccaatttagcagatggctcctggatcatggcaagagaagcagtttcactggtggccaagttctacattgtggttttgcgatttgtttctggaagctcagtctagtgtattttttaagccttcccaatgattatgtaagtcatgtaatagcctgcaataaatccttttctgattaaatagcttagtgattctgtgctctgccattgaaccctgacacaacatagaaattagtttttaaaatgtcattgatctttttgattgtgttatttttctttttcttatttgtaattgcatggatacaaaacatgaaatgaggttggcattatttattgctttgatgagcaggtgaattagatgatcacagttgctaactgatgcttggttagttagacccataggaaacacctgctgtggttcaacaagctgaggctggaggtcttccattggcccctataggtccactcctcacccttctctatcctgctctgtgccctgggactgcctagcaggaatggctttctgtgttccctggctttgcccatggggagacttgatttatgctggttgcccgtccctccaaccccaagtctttaggttaccatttactttctctttcaaaagtgtcctagttgatgtaatcctcctttctgcttagagtttgtactctctaaacaatgaacacttattaattccttactatacagttcctctgttttgccaactgagaatgtatagtccaaaactcatgagcagaatggccactctggtgctgtagcagtctgcttttgcccctggagtttggtgaggtccggggtcttatctcacaactgcaaaataggcacacagacatggagggtgagtagggcagagtaaaatttattaagcaaaaggaaagctctcagcgaagagaggggtcctgaaagcaggttgccagtaaggtgtctgtgttctgtgtctttt

SEQ ID NO: 96 - DNA, 1838 bp, synthetic construct
  misc_feature 1..1838: note = Description of Artificial Sequence: Synthetic polynucleotide
  source 1..1838: mol_type = other DNA
aaacagcctcactgggtcaatggatatcatgtggctgcctaacatttttactttataaaaggtcttcctgaggccatttgaaagtatggatcaaaacactttatgaacagggccacaggtttgcatgaggcttgtcagtggacctccaggatgaagaccaaagtgactgtgcaatttctagtggaataatttacacttaagatcttatttatttatcaaaagactgctgtgaggtaggaattcttaacccccatttgcagaaacagactttgcctgacaccacagagctaggaaaaagtgggcataagatcctcatcaagtctgacttccaaaagaagattcaaaaagaaacctccttgctacccgccaaatctctgtagagccagccatgttcacacatgaaacaggacaatgacaatagcaccaggaatagctactcctggtcagatgccctcatgaggtcaactccgcgggatggggacaccgggccctgcttaggggaaaggaagggggtttgtagaggaagcccagccagccaagcaaccagagatgggaaaaacctattgggaagaacttgcttgctctagctgggctttgcaaagaacaggaaaagatgagtctgcacagacagaaatggtctagaatggctgaatgtttcatgtagaaattttattttatgattaatacactcgtgccatttcttggaaccacttgcttgtttaattctagtctatcaagtgataattttgttgatatttagaggctcctcagttaatttctgtgggatttttcgttatatttaataaggaaaataataggaaatagctaagaaaaaaagaaacaaagccaattattcctgagcgtgtttaaaattattgaagtacacttgttaatttttagtatagaacctacatttcataatagaaaaccttggacttgccagtgttagctgctggaataaggtgtttgtccagtacattcagaatgtcgccacagattaactttagctcagtctcaacctgaaaaaataaaaatgaattttaaaaaattcagattgttgaagtctagaaattctgtaagttattacacattctatgtacctctgattttgaggaagagagcttagtattgaacagaattagtttccctctccaaactccattcctcccttttgacacaaaagcagagaaaagctgcctctgggtcatcaaaagtatcttttcctttccgcgtgcaattaagtgctacacacacacaccacccccaccccaacaccccatcacagtccaactgcagaatcaccaatgactgaaactgaacactgatgctacttggtaaacactggtcaattacatgaatctttcacaaggtagcaactattgtgtccatttacttgggaaaacagaagctaagacatttgctcaaagatcatccccttaaaagaacttaataagcagagctaggatttgaagccaggcagggtgcaagggacagaacaaaattcaaacccaggcagtttgccttcagtacttacattcctaacaacgttcaacaggcagtccctttagtggaagagatccaaaactagttaagataccaaaaatctatgtaccaagtaactattgccactcatctctattcatttataatgctgaaaacgtacaacacctctaaaggcagatacccagtttacttcctttttttttttttttttttttttatattgagtcaccctctgtcaccccggcattatttcagtggcgtgatcaaggcacaaatcaaacaaccccaccccggcacacaccaatcaccggccccacccacccgtgtatcaggga

SEQ ID NO: 97 - DNA, 1833 bp, synthetic construct
  misc_feature 1..1833: note = Description of Artificial Sequence: Synthetic polynucleotide
  source 1..1833: mol_type = other DNA
tgatagtgacaatagatagatggcttttctttcatttcaactcgaatggttgtaattttaagccaaagttacaaaaaattggtgtaaatatcactaacagagagatagtaagaaaataaagagctacaaatgtattcatttacgatgtctcagatatttttgattccaggtttaaaattatgtgtcatctaacgtcatcttcagtttactcctctgtaaaatggcaagagcatttaatttttagggtttgaggtttagatgaaataacttattaaacatctaccatatcccctgtttttccctccgccaagaaatatagtatattcactatatatatatcatataaagtaaaatactggctatgaaacatgcccagttttattacttttgaacctcagtattgttatacacctaacactgatggctgagctaagcaactaagaggtactattgattgataatctcaagctataatttttcaatgaaaaaggtttttcctctttctcctttggagaaaaaatatagaagataggaggctgagctaaaattttcatttatgaaatactatatttgccaactcctctgcttttaaatgtctggattgtacaggtggtttggggacttcatttattttgattagtttagctttatcctgaaatggttattggtccatgtctatgataaggtaaaagaaaattagaatcctaagaaagaaaataacaaaccactgattccattccaattatctttgtggcttgtgttagcattgattgtttcttgccatgatatttaagttcctgggactccactgcaaccactaaataaagagtgaacggaattaggataatctgattctggaagccagatactttgattgatggcttgtcatactattataaataagcaatttgccaaactcttctagttacagattagaaatatacaatgatcaaaaagagaatagaaatggggctggtacatgtggataaaataaaactagcagagtgtgaatcatttaacattatttctgaaattatttataattatacaattcagtatgctaacaatttagaaataagcttttaaaaatatttactataactacaaaaagaaatcttgggcatagactctgttttcagcaggctattattttctgctttctaaatctgttttgtttcaatttgttttactttatgttggtagcttgttgattctccctccagcccccaaatccaagagcaatgtttttttcattcatttaaacaccattgtgtttaaactcatttaattatcttattccctctagaaatagttactatcattagtaactactgatagataagttgttagatagatagttgatatataagttagatagatagatgttagatagatagttagatagagagttgatagataagtaactgagaaagtaactcctccaaagtctcagtaaaaggaaaaaagccacttcaagcatctgtctgcccaccttctgcccaaacacgtttttcaccatgctaaatatcaagttaaggaggtgccataacttgcattttgtgaatatcacacaattctttttgaattctcaatgatgtttatgtttgacttctattcatttcgacttaataaaatattcaaggggttgggttagaattttagcaataccaatatcagctatttattttttttaagtaactgctctattctgttaattaaggttaatataaggtcacttagtgataaggtaaaaagtgagagtgcctggctctgtacttggaacatagtatgcactctattttattcctgttttcctaagatacagtgaataaa

SEQ ID NO: 98 - DNA, 1832 bp, synthetic construct
  misc_feature 1..1832: note = Description of Artificial Sequence: Synthetic polynucleotide
  source 1..1832: mol_type = other DNA
ggagaaatgcctaatgtagatgacgggttgatgggtgcagcaaaccaccatggcacgtgtataactatgtaacaaacctataatgaaatgtcaactataatcccagctcaaagagaacaccataaaattatgaaaggctttccacaaatctccaaatttatgtcttcataagattacatctctatttcttcttgaataatttacttattttagctatgatttagtgatagtaagatggtaattatgaggagaaaattctcccaacattccattgagaaaattctgcctcatttcaccacaaacctgagtcttaagcagtcacttctaatgtagctgaataataatagatcctcacccagctgagtctatgagttgaatccatgtatgtgagataaggcccccaaggagtggtaataagctgggaatgccatcagctcatcttccttcaggcctatatttgttattgtcacttgtagaagcaggacggcccctggcattgggattggtagaaacagagtatcaaagggaaaactgaacttccctaatttttggaaaacagtagattggaaacagatgggctccaacgttttccatgtgtgaggtcattgtcccaggtaggcttactcaggacatttcttgtctgcaaaacagaagtcaaacaatatttctaccttccaagagaatagaacataatgtcagattttcttatggattcccacaagttcaagaaagtttcatggccttatttaactgcttaagcatttcaactaaaaaaaaattgtctttcaaatacacagcaatctgtttggaaaaattttaacgagaaaaatttggaattctaaagtaaaaaatgcataaggccataaaaattttttatatcttttaatttagaggtcaactgggggaaaaaaaattctctgaagtttgcttttataccattaaagacttattttttattaccagcaatacagagggacttattcaggttgaatcttgaaggtaaactttaacttagttttaagttttggctaatttttaagcatttctcagtcacctaccatgatttcatctcagaaaccaaaatctcaatttcatttagacctttgaaatattaaaacagaaggctaaatgcttcaaaataatattcatgtagacacttacatatgtggaccaggaacctccatatatttcaaagtttatgagaacataacaaatgttgatacacacatttaattctgaaataaaggcttacaacaaataaagctgtaacaaatcaagaaaattttgtaggttacacattttatgtctaaaaatataggtatgaaacactcaaggatggataaaagaagaaatcacaagagaaaatagaaaatatctagagacaaattaagaacatgaaataccaaaagttaagagatacatcaaaaacagtaccataaggaaaaaatttatagctataaatgattataaaaaataagatactgaatcaacaactttactcctaaggaactaaaaacagagggaaaaagagggacaattaaaagctatcaaaattttaaaaaatgttaaagatagcagtggaaataagtgaaatagagaacagaaaaacaatatcaacaaaatcaagtttgttctctgaaaaagatcaaaactgacaaaattttatctagattaactaagaaagaaagggaatattcaaattactaaactcaaaaataaaatgggtacattactaacaaatttttggagtaaaaaaggggtgtaggagagtaccataagggactatatactaaaaaattgaatagcctaaataaaatgaacaaattcctaga

SEQ ID NO: 99 - DNA, 1831 bp, synthetic construct
  misc_feature 1..1831: note = Description of Artificial Sequence: Synthetic polynucleotide
  source 1..1831: mol_type = other DNA
acaacctgttcagtcacctgacggtcgcgcagaacatcgggctggggctaaatccgggattgaaactgaacgcggcacagcaggagaaaatgcacgctatcgcccgccagatggggattgataatttaatggcgcggttacctggcgagctttccggcggtcagcgacagcgcgtggcgttagcgcgttgtctggtgcgcgaacagccgattttattgctcgatgaaccgttctctgcgctcgatccggcgttacgtcaggagatgctgacgctggtgagcacgagctgccagcagcaaaaaatgacgttattgatggtgtcacacagtgtggaagatgccgcgcggatcgccacgcgctcggtggtggtcgccgacgggcgcatcgcctggcagggtaagaccaatgagttgttgagcggtaaggcgagtgcttcagcactattggggattacgggttagtatgcactgtcagatgcggcgtgaacaccttatccgacctacggacagtgcgttttgtaggcctgataagacgcggtcagcgtcgcatcaggcaacccgcacaagacaatcccctaaaccccaaccactttacgcaaaatatcgatatacaccggcatcaacgggtggcgaattaacaccaccagcgccaccacgccgatggcagaaatcaacggcgtcagccacaacaaacggccgcgcgacaaataatgacttaaacgatcggttgctttaccgctgcgccataaccgccagcacagccagccaccaacccacacaaataccgccgtcgccagcagcaaccatttaaactcgccgctctgcattccggctggaatatcgatcgccgcgcccgccagaatcccaggcaggaagtaaaacggtggccacagcaggcagccgataatattcggcgtaatgaattttgccaccggcagatccagcattcccgccaccattggcaccagcggacgcgtcgggccaacaaagcgaccgaccagaatggtgaacatgctgtgttgatgcaacgcatgttcagttttatcgagtaatgctttgtttttcttcagaaatgaccagcgatgcaacggctttttaaaacgccagcccagccagaaggagatccagtcgcccagcagacaaccgacaatccctgccagccaggcgtgccagaaacttaactcgccgctgccaatcagcgctcccagccccgccatcagcaccgtaccgggtagaatcaaaccgaccagcgccagcgactccagaaaggccaccaacaccaccgccatcaatgaatacacggtagattgggtaataaagtgttccagcaatgcttgcataatgtgcctgtcaaatggacgaagcagggattctgcaaaccctatgctactccgtcaagccgtcaattgtctgattcgttaccaattatgacaacttgacggctacatcattcactttttcttcacaaccggcacggaactcgctcgggctggccccggtgcattttttaaatacccgcgagaaatagagttgatcgtcaaaaccaacattgcgaccgacggtggcgataggcatccgggtggtgctcaaaagcagcttcgcctggctgatacgttggtcctcgcgccagcttaagacgctaatccctaactgctggcggaaaagatgtgacagacgcgacggcgacaagcaaacatgctgtgcgacgctggcgatatcaaaattgctgtctgccaggtgatcgctgatgtactgacaagcctcgcgtacccgattatccatcggtggatggagcgactcgttaatcgcttccatggcgctctgtgtgcagc

SEQ ID NO: 100 - DNA, 1831 bp, synthetic construct
  misc_feature 1..1831: note = Description of Artificial Sequence: Synthetic polynucleotide
  source 1..1831: mol_type = other DNA
atggcctagttacttcaagggcacccattattagagaggaggagattggggatccaagaataaaaagataaaaacctattgcagttatagcaagattaatatttctgcatgtcttttgattcctgcttgaaaggctgcataaataactcctaacttttaagcctgagggttttggccaatggggtttgactctgtgaggcaaatatcaaggatattgtggctgttattgaagaaactcataggagatatatctacatcaagagttgcatggcagggaagcttaaaataatttgtttgcacagaagtagattttgaataatatgacattttggtatattataacattaaaggataaacttacaaatgtcaatgaaatatttcactggcttttctgtcaagcataattaatcataaaagatttttaactgaaatgaaaatgctcaattctaataaataaatatccggtacccagctctattgtctttttgcttaaggcattgtctaccacctacctactacaccctgagtgtctgttaaaaatgtagatttctaggctctacagacgtcccacagaatcactgacctaacacataagaaaaaaaaagattcttaaattaaggtagtgcttgactaccttattttcaaagtaccccaaagacctcagattgcctgttgaaacaagaatgctacatttggtttagctatttttagtttagaggatgagcaaaacatcctattctagccataattatgttagcaggtgtgcaccagataatcaacttgactaaatatccatcttgggttcatacaggcaggatgaacataattaaagttaaaactgccagccttcactattggggaagaaatgctacaggatacagtggactattaaagcaatatttttctgaggaagatctacttatttttctcattagttttagtttgaagtgacacttcataggcatagagtggcagcctacattcggatgtagttatacaggcttagtgtaaagattcaggtccctaatgagacaaagaacattattaggtactctgagtgtgggaagattacaggaaattaaaaatcgagtattctagtttataattctgcccttttgggctaatgggagtaagttccctttctgatacttaaagacagaaatctcttctctaccattcttgtccaaatttccaagtgagacagtcccagtcatgacaagctttttcttacaacatggctttcagttactcaatgaatatttattgagcaccaatgctccaggcagtagagaacaagagaaaacagtacagaacaagaaaaaaaatcttgtttggtgcttacatttagggaagacacaccatttctggttgctccaccctcatagtctgattagaaagcaacatgctaatgataacacttcccttattctggacatatacttctattaattattaggttgttacttttactggaaaccataccaaccttctggttcctattaattctacagtgaagtaaaacttctgagtgtctaggtctaaaaataagagtgtccttaatggtaacctataccaggacagggtagactaacatacgctgggaactagactctcccactaagaaaaataacaataatgactatgggtattggccaagtaatacatgctaagagagagtacagtatactctgaattgagtggtttccaaagtgtctcaggcacggatcatttgatttcaagtacagaacccactcaatgcagcttaggaaattaaaggtgaatttgttagaaggatgaagctatgtctcacagagggcgctctgtgtgcagc

SEQ ID NO: 101 - DNA, 1829 bp, synthetic construct
  misc_feature 1..1829: note = Description of Artificial Sequence: Synthetic polynucleotide
  source 1..1829: mol_type = other DNA
aagaaaatttgcataacacaattaccatgcttgatttattgaacatatgtaaaattctgccccaatatgcattcttcacaggcacacatggaatgtttactgaaattgaccatatagcaggccataggcagctatcaattactttcaaagaactggtaatattcagaccacatcctcttgccacaatgcaattaggttagaaatcaatagcaagaagattaaattgaaaaattccctatatatttagaaattaaaccacatgtctaaatagcccaatggatcaaagatgaaatcataatgcaaatgaaaaagatgatccatagttggaaatcatccaatccagtgttgtatgcccttgacccagagggccaggtgggaggggccatggtgagggcctgacaagggctctgggaagattcttagaaagattgatcctcaagcaattaaggcaaaagcatccaaatccctgacctgtggagatttcatttttctttattgatctgtcaaatggtctaaattctctcactcaggttgcttcttctataattaaggataaaaatattcctgtgttgcattgcagagtgtcaggaaaatagtcacttgagcagaccttgcaaatgttggctggacgccctcacctgcctttagggatgcctccgggggtatataattcctaagtagacacccatggtttcgtatatggctactaacatgtaggcagggcctctggataccccaggggaagacctttgatgcctgaaggcagctggctgcagtttaatcgccaggtagttcatctcagccatacactgaactgtgggcttacacctgggatgcctttgaattggagagctacaggaagtgactgtgccctgggcttctcttattccctttccaagcttccattcatccactttcaacccacattcatattcctgccttaacggcaagttgcaaggaatgagaggcatatctgtgccaagcactgtgcaaacctgcaagtccagtgtgcacctgtcatttttcaccctcactttttagcatatcaacctggagaaactcgatgcggctttctgcattctaaggcccataatgccaaggtaggacccatcactccaaattattttttaacttattaaaattagaacctaagtctagatgataatctaattccttcctcctaattaatatcattaattgaactgattaatcctaaatgattaatcctgacatgataatggaaacaaagtcaagcctcctatttcctaaatacaaatgactaaatgtagcacaatgctgtgtgagccaaaattcggattatttcagtctcttctggaggatgtctcaatacaaactccttaaacttagagttggaccagctcatgttgtcacaaataaaaagccctgcctggctttctcatttgaagtttgaagtacaacttaatttccaagaaacttagatagcatcacgtgcctctgacaagcagttactagccggtatttactcctcaatacggaataaatttaacagcaaacgaattacatctaaaaccaaatcttgtaactgaattaaggtaaatatgctctttctatacaactaacataaagtttaaataggcagagaaaagaggcatctttacttcttaaaaggcaattttcaaaaatgaattgaagagtaatacatctgaataataatatcaacaaaaagaacaactatcccagcactttgggaggccaaggctggtggatcaaatgagccaggagtttgagaccagcctggccacaaaggtaaaaccccgtctctactaaaaatacaaaaattagctgaa

SEQ ID NO: 102 - DNA, 1829 bp, synthetic construct
  misc_feature 1..1829: note = Description of Artificial Sequence: Synthetic polynucleotide
  source 1..1829: mol_type = other DNA
ggctaatttttttgtatttttagtagaaatgagatttcaccatgttggtcaggctggtttcgaactcctgacctcaggtgatctgccctcctcggcctcttaaagtgctgggattacaggcgtgagccaccacgcctgccctaaagtcttttaaaattcacttgtataagttgacttagttttctttaaccttgtagaaaaatacaaaaatggcaatctcttttatcacacaaataatgtctttttaatggagtgatttttttctaattgaggtattatgtacttttcatttactaattattgtttacatttgaagtgttttatgaattaatatttaattgcatagatgaagattactagttataggcattttactaaccaatactcattaagcatagcgtggattcatatgacatcaaggagctattttatttggtaaaacgaaaaagcacaagaatgaacgaacgcaagaactgaaacagtggagacacctagaatgacttgtctaagatctaaatcattttgttgtcttcccagcgtacttattatcctgatcattgtcatcagcattgtttgggtccttttagcacagatttctcaaaatgggtaactccataacagttggaagcttacgaattcatataatttgtaagaggtcaatttggaagtacctatctattttaaaattccaataacctgggaatttcatcccatgtctagagtcttttatgtaaaatatttccacaattaggagaaatatgtgcatggggattttctatgtagcggtgttttgatggaatagaaaattgggataaaccaaatttccatcacgaaggaaatagtaatatgctgaataataatacagcgaatattatgcaggctttaaacatcaaaaaagagttcaacttctgacttccgatgatggtgttgaagcaggtcactgctggtttacatttgattttcatgtgggaactctggaagtccgccttagtgattttacatgtggctaaattgagctaatgacaagctgttcgaagtatggcaaaatggaactttaaaacagtatcttgtcaacaaccaagaggacctgtttcacataaagcccacgcattcatctgcctgtccatcattctgtctgtccacacgggcatcattcattagtggaactgagtgcccgctgtcgagctgacaagcccataacctccctgttcctagtcacacattaattcttcaacaagtcccttttgatagattgtgattaagcttagctactatttccaattgcttccccaaacgtacttctcactgttctcccatcacacccttcagcccatccatgcggggttcctttgcttttcccaccttacaccaaactccctatttttactcccactttgacctcctctccaagacaaaacaaacaaaactagcattttaaaacttagttgtaatctttcttccttcatgaaaatttctccaacagccactcccacggtcctgtgtgttccggatattttaaaataatggctataaggttgagcacttcaggatacgctgttttgctgtgtgcagatggaggcagtggctggagtgaatgaacggcaacacttgctggcaaccggcagaagctgagagacagggaacaggctctcctccagagcctccaggagccaggcctttggacaccttgaatgtgggcttctgggagaccatgcgtttctgttataagcagcccagtctctggcagtttttacggctgccccggaacactcatctatacctgtctgacaaggtcaagctccaaggaagggattctctacatatctaca

SEQ ID NO: 103 - DNA, 1828 bp, synthetic construct
  misc_feature 1..1828: note = Description of Artificial Sequence: Synthetic polynucleotide
  source 1..1828: mol_type = other DNA
agctgggctcctttgtcttcaggcagccgggctgagtcctccccatgcccgcctgtccccacagctgacccctttggcccgcttctgccgtcttcaggcaacaactcccagccctgctccaatcctgatctcttcggcgaatttctcaattcggactctgtgaccgtcccaccatccttcccgtctgcccacagcgctccgcccccatcctgcagcgccgacttcctgcacctgggtaagcgcctctcgcctggcagccagctctccatggccgcctccctcaggaccgcagcctctggtgggaaacagagctgtgggtctcaggcagtggtggggctggactgtgtggcctccgggtgcgctccttgcggcccaagcatcctgcaggacgtcccagaggtcaggacagactgctccctgctctgtctccccaaaccatccccaaacctggaacaggttgtggggccctgcagtgcctcagtcgtctgtgactggcaacaggtgtttctccaggcctcctcaggcccaggccttgcagctgttagcagagaaggccacctgcacccagagcttgtgtagggaccagaggtcagagggaggcagctgggggacccagggtccgggaagctgacctggtctgggtgtagcaggggccgtggggcaccgtatccatggggaggaggtcaggcgccggggcacagcatggcttgtttagacagacgccggtggggccaggccctgggagagggctgggcgcccctccagtgtggtcctaggggaaggagcctgggttctctctcctgaggaggcagcagcgtggtccacggcgcactctggggtgatgatggtgaccattgcaggatggcttgtgggcgggtgtgtggagtgcagccttgcagcgttggggcgggtgccgccagaggtgtgctgcgtggccagagccagggcagacaggacctgctgggccctctgtctgccgaaggcagctcagccaggtggagccacctcgggctctggtgggttttaggagaggcgggaacgcaggctgtggggatggcggcagaaagtggggtcctgacaaaccctttcggatgggaatgcgcagatgcttgttctcagcctggcctgcgagctgctccgcctgctggtgcccctacgtccactcgctcagttctgtgtgatgggatgcatcctcaggacccttcaggaagagagaggccgtcagcccagcctcagctcagcctgggtgcaagaggtgtccgctcctagggccctgagcacagcctggcgccccgccacatttgcctgctgctgagacaccaaactgtgctctcttctggttccttcttcccaggggatctgccaggagagcccagcaagatgacagcctcgtccagcaacccagacctgctgggaggatgggctgcctggaccgagactgcagcgtcggcagtggcccccacgccagccacagaaggtatggccaccacccaccaaggacagggctcccaggacgtgcagctgctgtggcccgtctctatttcacacgtacctgtaacagggccctctctgcgcagagaaggaaggaagggctggggcgtgcttggtggtgcgggctccgcacacaaggctgtggtatgactgcagcggcctcactcacccggtgtgcctggggtacgtggggacacagacttggcgtcccagagctgcagtggctcctgagcatcagcagcacccccgaagggtcctcctcccacccggcagggcgtctgcgtctgtgatgcgatttcatgccccacactctgtggaccacgtgctggctctgcct

SEQ ID NO: 104 - DNA, 1828 bp, synthetic construct
  misc_feature 1..1828: note = Description of Artificial Sequence: Synthetic polynucleotide
  source 1..1828: mol_type = other DNA
tttttcctatatatacacacccttgacagtttaatttataaattaggcacagtatgatattaacaacaataaaatggaacaacatactatactaaaagttataggaatgtggtctctcaaaatatcttattctactgtattcaacacattcaaaataataaaatattcaagatattcaaaatatcttattgtcttttctgtctacagttgactacagggaactgaaaccacagaaagcaaaactgtggataagggggattactgtacggcataagattcaagtaaggcagactggagaatagccattggagttgcatataatttaggttaatggtgagcattagaataaaccaattaagactacactgaatgaaagtgcaagtgaatagtggacatatttgtcagaaaatacaattgtgaacaatctgctataaattctccatgtatagatgaattgacagaaacgtatggggggttagttaaggacctgtggtcaactcaatcctccagatgttctaggttttagccatgaatcaagtagggccttccaaaagctgtctgggactgcaaagttttagcaactccagaaaaacctcattacgggagttatgctttagcactaagtgactctttctactgcaaaatgctaaaagtatttatttccaggttggcagtaaaaaaaacttttcactacatcatctctgtgaccaatgcagtcagtgttccagactttggtgacagcaagtcttcctgtcccatgagaatgcagcatgcactccttccaggttccattccaatcatgtaacaaacgtgactgcctttttgttgcagcatcagaaagaccagagacacatttgtactccagttccatggcttataacctgcatatgtctacatgccagcattattttatttatgtgcatttcctttgacgtgaattttacttatttctattttttcattttaatccgtggactccataaaggcaaaaaatacaatgtaaaacaaagagaggaatatataaacaaatgactcacaagagatttgttcatcttttgttgattgtggaaatgcacagagcactctggaaacatagctgggagaacagtcgaatggagtgggttaagcagagaaccggtgtggcttggtcctagattctcttgcccaaaacgctctacacaatagctggaaaagactaaaacaacaacaaaacctccctgtgacagaatagtcattcatgcctcaataagggacaacaaatatgccactgaagatgtacccacaagtacattaattagtagagatacatacaatttattttgggattaatgaaaacatgtattacctactgatttagggacaattaatttatccaaagaaacaatgtaataacttaaaccaaagaaatatacatttagtcttcaatgaaattaatactgtagaaatataattcagctgcattaacaatttcactactaatatggagattctacatgattccatataggtgtttccactagaatatatcttgcttttataccttcgcatcattgaaaggattcatgttttatatatctacgtatcactgaaaggatgcatcttttatatacctaagcatcattgaaaggatgcatcttttatatacctacgcatcattgaaaagatgcatcttttatatacctatgcatcattgaaaggatgcatcttttatatacttgcgcatcattgaaaggatgcatcttttatatacctaagcatcattgaaaggacgcatcttttatatacctaagcatcattgaaaggatgcatcttttatatacctaagcat

SEQ ID NO: 105 - DNA, 1825 bp, synthetic construct
  misc_feature 1..1825: note = Description of Artificial Sequence: Synthetic polynucleotide
  source 1..1825: mol_type = other DNA
gcgctctgtgtgcagctgcgctctgtgtgcagctcagtcttaatttcttcgtatagatttatgttttgaatgtatatcacacggctactagcagagaaagtttgttaaaatgtgcactgaagcatgaatgtgctgacaataaattgtctcaagatctttttgtaatgacagaattttatttgcctttcacttttaatgaaaatgtaatgcacatagaattccagtttgcatttcacttgtaatttattttcttgtgtttattattttgttcatggagatgatcacacattacattctgctgggcctttattaaccacatttctatgaacctagtcagggttggatttcaagtgtatggttgccacggctatcagagttgaagtcagcttctcctgttcacaaaaagttcaggttcctccagtgatacccacttttgtgtcccggtttggctcttcccatttctttctccccagagagagcctgtctctttcatctgtggcaggtgcatcctgctgacacttttacttggtgattgtttgtggggtgaaggggcttggacacagggggatgttctccaaccttctgaccaagcatccttcttagctatgggtggtgagaatggctctgaagcatggtcttccaagcgttcctgttccttcccttccccaagtcagagtgtctctttctagccacagtggtcttccatcagtgtcctcagcttctgacccactgtccttactccacagactcaggatttcattcctcaggaaagagacgggaggtgtttctgggtagagtctccttggtgtcctctgtttccttctgttctagttgattctaccagtgcctgaaggacacaagatttaataaatgtctcccacatatcgtgaagagggattcagcattgaacggagctactgttcttcctccccagtcaacatcacaggacagcaggtggctgagttgtctggggatttctccaattctgtaggaaaagcccgcaagtgccaggagtttcacactctcacagcattagcacacacatcctcaacaactcatgaaacatttccaggttagctttttcctatcttcaataccatacaatgagtggcacctgccccaggtactctaataaatggacctagttttctctgcaggctccccattttctcagatttcaggggtttttttctctgcaacatcaactcagatatgttgaagggttcattttttgtagttcttcaagtttcttgttaatgaggtcagaagaagatcattttctcatttttttttttacattcccgtgcttagtatctgctttctaaataaaattcggaaactaagacaaaatatcaaatatccactatttggtgcattgttaaactatttgagaaatattcatgtactgaaatacaatgaacaattgaaatcaaggcatgcctcagtcacataagaatgtgaggacattatcaaataattgtgctgagtgaaggaagctaaagaattcacagtaaatctcctgtgatttcttttgtataaattgtagaaaatgcaactattctaaattaacatggagaagatctgaatttttctgagaaaagtgtggtgaggtaacaagatggtgaaataaaattacagagaagtgagagaaaaaaatttggaggttaatttaattgctaatagcacgattgaagtgctgattcaaaggctgcacacatataccaacattttccatatcgtacactataaatttgaattcactattgattgaatttttgaataaagcagtaacaaaaatgagtatattggctgaggaagagcaaga

SEQ ID NO: 106 - DNA, 1824 bp, synthetic construct
  misc_feature 1..1824: note = Description of Artificial Sequence: Synthetic polynucleotide
  source 1..1824: mol_type = other DNA
gaaacaccaccaccacccgccaggctgctcaactcagaaacaaacccctcctccctctcccaatccacacgtcgaatctctctgctctgtccatctccactgctgccaccccagcccacattaccgccttctccttggacgaaaccatggccttcaaagtgtgctctaatttccctctccccacccatcagcgagtagcaatcttcttaaactgccattcactagccctccgatggtcttgcattgctgctaggccctgcatggctgcctctgcctcgatctccagccccacccatgtcaccaccccctcactgccctcgtctccttgaaagggctgtgcctctgcccaccacagggcttttgccttcttcaccaagtaacccctactcttccttcccatcctggctcagggaagacctggcaatgccaagggtctttcctccacagcagttaatgcatctgtagttgaacatttattggtatgatcattagactaatgcctccgtcccacaccagactaacccccacgaggatagggactgtgtgtgtggctccctagcccagtgcctggcactcaacaaatatagtaaaacaaatgaacagatacagcctcatcctccactgccatcaagaccacctttaccataaaatacctttctcacctcaaccatcaccactgtcactgacatcttctatcagccacatgacagccataacctcaatccctgccagcaccttatcaccaccatcacagagatcagtgtgacagcaacatgtcatcaaagcccttttcaccacccatcctcatgtgcagggtaggggaggacagactggggctacagctgagacaagacaagccataccacaccctgcacaagcccagcgtcacccacctgcctcctccctctcgttgacctcaaagcaggtccaatagtccttctccctgatgcccacgttccggcgatccaggatctccagggtgagctcctcagcagtcatggatgctgggacctgcaaggaccaaggaggagattagcctgcctgtgcctagcccctgctctgccacaaccttgctatgtgactcagagcctgagcccatccttctcaggcccttctggagtcctgggatagagaggggtatttctgagtggtccttaggagcagaacccagcaccagccagatacaggtcccaaactggtcctctcctcggggtagaagcactgctcccctggccatctgagcctgtacctggcccagcctgattctctagccccttggcttctaggtcccagcacctaccttgatatgctgctcagtctctgccttcttctcttccagatacactgtgcagatgaagtcaccggcatgctgcagggagacagggctcagctgggggcctaggaaatgggtgcaggtggcaggtccaagccccccacccaggctccagccttcacctgggtcccactggcagtgccagccacgcgcatcttcacaatggcagtgatctcctcccgctgcttcctgagctcttcctcatccacctgggaaggggcgagaggcagggacaggtggtcaccgtcatctgcaaggatcacccctgccctccactgcccactggccagggacgcacactaaacaccaccacatagtggttaatgaggtcttccaccacacggccagccttgtagtcctgcccatctgtctggaagagcgtgggcccaaacacaattgccaggttgtgcacgttcatctggttcgtgtctgagaagcactgaacactggagaggggaggaggagggctttgagtgaggagtcaggccaga

SEQ ID NO: 107 - DNA, 1819 bp, synthetic construct
  misc_feature 1..1819: note = Description of Artificial Sequence: Synthetic polynucleotide
  source 1..1819: mol_type = other DNA
ctatgatgttacatttatcatccggtaggtacagaatcaatctctctctctccctctctctctctctctctctctcctccttctctctttcttcttgtaggctatctaggcagtctctgtggactagatctagtataaggatcttattaaagcaagatccaagcaaccaagcgaaagattctaccttcaaacatgaggagatccaagaaacagcatgcactacatcagtggaagccaataccattgagctatgaacattcaggttcttgttctccgtaggggaaactccttttctagattggtatccttagaggtatttgatgcacacacttgctaggatagtctatatgccagtgagtctcctcccataggttcagcccatatatgattcacgcacatgagagctttgctattccatccatctatctgtaggttttaggagaaattcagcaatcctaaattattggtgctcacaggatatggtggctttctctgagacctgggcagtctacataagaagggttgataagggctgtggctagaattgggactgagagtcatttgcatactcacacaatctgcatacagggaagagacagaaaggagaaagcaggtcaaggactctgagaagttgtacaggtttatgtctcaatagcagagctaagcaaggagcagagtccgcctgcttttctgttttatatgcctactctaagaccattctgccagtgatagtgttgaacctgcaagtcctgctgataaatatacatcagggtagcaaatgctaagggcatgagatttgaggaaagagatggtatttttaaggagtcatcctctggttttattcatacattttgtgcaatagtcacctggatcagaacttcttctgggaggctcactggactgttccttttggttagcaagatatacgccttcttctttatcttgactaagactccttaactaataagtaataaaaccgagacttgaacccagcccagtctgactctagaacctatacttttaaccattaatatcagctgatattagttctgacaaataaatgtcaaatgaacactgaatgcaattaaatggtgccttctcattgtcttctttgagacagcatagcatagtggttcaatattgattcaatagctatttattaactgtttatttattagataagagcaagtgttcttttttttgagacaagctctcactctgtttctcaggctaagtgtagtggcacaatcctaggtcactgcagcctcaatctccttggcttaagagatccttctccctcagtttcctgagtaaataggacaacaggtgtgttccatcatgcccaattaattttttcaattgtttggaagagatggagtcttgttatgttgctcaggctggagaagcaggggttctcgatgaagacaacttgtgtctgtgctgtctaatatggaagccactaccaaatgggactgttgaagacttaaattatagctagtgtaactggggagctgaatttttaattttatttaatttaattacacataaatttttaaagatactcaattcaattattagaaacattcaagtatgtttgaaaaaattggggtatgtgaatctacatcttcaataataaattttacaaaatcaaaatatatcaagtatttcaaaggataattgagtgcccacattgagatatccaataagtgcaaaatatgtaccagatttcaaagactcattacaaaaaaaggaaagtaaggctgggcacagtggctcatgcttgtaatcccagcactttgggaggccaaggcaggtggat

SEQ ID NO: 108 - DNA, 1813 bp, synthetic construct
  misc_feature 1..1813: note = Description of Artificial Sequence: Synthetic polynucleotide
  source 1..1813: mol_type = other DNA
gctgcacacagagcgccgctgcacacagagcgccataggtctagaccgttgttaatttaggaatagacaagtcagatttagaaggactggtttaagagcataggctttggaggatgtcagataagggtcacaaatccatgcttactaaatatgtgatcttaaggaatttgtttaatatctctgttactcagagtcctcatctataaaatgggaatcaaaataccgacttccagaaatgttataagaaataaataaaatatgaatgccaagcacttaaatttagagaccgaaacataggtgctacataaatatttgctgctgaatgaataaactgggtaatcttgggcaagttattcatgaacttctgttgcttcatctgtaaaatgggaaaaaatactgctcaatctcagagttgttaaaaataaatgaaaccatgtacgtatttcatatatgtacatagggcaaaatgtacctctggaatctagtaaaaacctaataaactgtactctttggcaatattattttttaatatttagaaaacaaatgccaaggttcatggtacaatatgagttcagagaaagggcagaccattgtgggtgggagtcaaaaaggaaggcttcctctagaaggtacaactctgaattacagttatacaactctgcaggggccactttacctaccctcataacccattgttaccagatgccttgtagcaaatggaaaccaaggtgccaagaaatagtttctcgcaaaatcccaaggagttacacgttcatgggaaagggccatgtgagttccaccaatggcctttgcattccctggtgaagggcagtgaagcataaaagattactttgtttttgtgaacactactcctgcaaaggcattattttatttcctcagcattcatctgcttcaattatatagttcacatttggtttgttggtggtggtggtggttttatcttggatttcttcttttttcaaattggaaatagctttatattttcttctgatgatatgtgacacatgctcatgattattaatcaatagggaaaattgaaggagaaggtaaagatattggaaattttccctacaaatcagaatttctaaaagagaagtaggagaggccctaacttcatgcagaaatcaatgataattaactttgatccctatagcagccaatagaatcttagctacaactctggtcatgtcattctcatgtttaaaaaaagtttggtttttttttttccccaccaggacagtcttagtcttgagcacagcatatgaagcccttttgtgatctgattcttgcccaacttgtcactttccaccattctccctctaccattaattctatgttctggccacagagaactactttaaattctccaagtgttcccttcttacctttaaagcctttttcacttttgaattttacacagtggagaactaagctaacaagagcccctcttactataaacacatagaaatgctagataaaatagagctaaaaacaattttaataaatgctgggcttaaaaaaaaaatacctggtaccagaacttaagaagaatttgaagtcagaattgcaaacttcctaaagacttggtggcttaagaggatagtggacatagatatacgtcctaaaaaatatgaagagtaattattcaaaaaagagcaggaggtgtggtgttgactgctagttaagtccaggagctggaatttgatcccccttttcataaaacaagggcactgaagggactatcctttcagtaaaagaattcaaaagaatccacccagcaaccaaaacaggc

SEQ ID NO: 109 - DNA, 1806 bp, synthetic construct
  misc_feature 1..1806: note = Description of Artificial Sequence: Synthetic polynucleotide
  source 1..1806: mol_type = other DNA
ggcaaaagacatgaatgggaactcaccaacgaagacctatttatacagattaagggtatcattagatactattccccaaaacacactgaaaatacataaagaaagaaagttggacaggcaagaagaaatcaacaaaaataccagggtagaggagatcgttaatcaaacttccttctctttgagactcaagcaagcatcaaatacacaatggaaaaactggatgaagcaattgtttagctcagtttaatgggtatgtatcaaacttagtacctacaaagaatccacattctttccaagtttctttgggacagtttaagaaaatgaccattctctagacagaaaatctcaaagaaatctctttcaaaatgagaaaatttgtagaacacatccgttgaccacaataatggatatttaaaacaaaataatactcaaataacaataagaatacatttatgggaaattaaaaacattaagcaactcttgaaaatagaggaaattaaaagtgtaactatggaccattaagacaataacaatgaaaatacatcttaagagatgtggtcaaaattgaactcaaaggaagcaaatagccttgaattcttcaatgaatgaacataaatgagcagaacatcccaccaaaaaacaacttgaaaagaaaataataaattaaaccttaaaaaagaaggcattactaaaaacataagtatcaattaatcaattagatacaaaagaaataaatacccaggagaattgataaaactgagaactggatgtttcaaagaccaaacaaagagacaaagttctagaaattctaattcattttaaaaataaatgcatgcctttaatataattaaaatactttgtggtatagtagtaaataatcagatcaatggaatataatacaaggtccagaaacagagctaattataatacatttaatgattttaaaaaagcttaaataagcatagaaataagatattggaaaataattaatttaaaagccccatgttttgctacctcagacctcacaatgaataaatttcaagttgattaaagttctaaatatataaaatatacccataatctggaaggatgtatgagtgaattatcaatactcgttagagtagggctttctggacaagaccacaaaacagaaacctaaagaaaaagattgcagaaattggctatatatttaaggatatttatttattcaataaacaaataatgtctcctatgtccaaacactgtaagaggcacttagcgaatggctatgaacaaaacccacaaagattgaagctctcaggtgaaggagacagaagaaaagcagtagtaatagttaattcgtaagtaagcactaccatttgttagatgatgaagtgtacagctcatagaaagcgataagaataaatagacccatagcatggtgagaagattgaggatgcagagaatgagttgcaattttatataatctagtcagtgtaggtctcacagagaagatgacagcggtgacagccttgaagagatggagggagccacacggctgtctcagagaagcgtgttctgggcaggaggagcagcccatgcaaggcccctgaagtggggacatgcctgggccacaccaggaatagcaaaggggacctgtgactggagatcggctggccaaggatagacaccaggcgataaggccagagaggtgatggggcagaaaaaaacatggcaggatcattgactttagtcccagagagatgggagccaccgaaccgacaaggggcaaggatctgttttgtctgaatcgggtcactctgtggc

SEQ ID NO: 110 - DNA, 1801 bp, synthetic construct
  misc_feature 1..1801: note = Description of Artificial Sequence: Synthetic polynucleotide
  source 1..1801: mol_type = other DNA
aatgaaagacaggggaagtagagtttgaagaaaggattaattgaacctgaggatggattggatattaaaaatgaatgaaaagaaaaagtaatgatgactaaaatttctagactggataattaggaaaatgttaatttctgatgtaaaagggaactcaggaaagagtcaacctaggacaaaaatcaaaagacctacatatggaaagaaatatactgatttgagtgaacccaagcagagtttgaagacacagattcaaaggtatttgacaacaaaaaaaggactgtgagatcaatgccagagacggggactcaattttgcatactgcttatatactgcctacgtaaaggcactttatgataaagaacatctcaaaaaaataacatatagaacaaggggcaaaaatagaggataaaagagatgattcccaattattggtcaagtggttggagtgagaattaaaggcaaaattcctcttctccccctcaaaattacacacaactacacaaacatatgtgttaatgattttagtgtgttgaatctggctgcttccacactgcatgcatcctatctttctccattcacacctgagataatctcattctagtgaagtcttacattataaatgacaacaccaatatttagggacgttcctcttttttcttcactgactttgcctttccaaacaatatactttgtgaatcctctgagaaaaaagaaagtagtttgatctgctggtttttaggacaataatttttaaaggacttgttatttttggtacagacaccatgcaaaactcatcttcaatcaagggcaggtgccgggtacagcatcaagaaagtaacaggtggtttctcttcctctcctttcctctaaaactgaataaaacaaaagttttagcatttcagaaataatctttttaattaaaagtggaagataaatgtgataaaagttttctttgagctcttgaaaacaagttcattctataagggttagaaatagtattttttatctgtcactagagccattgtactgtggggcctaatgtttcagattttggatactcatttctttcgattgaaggtgtcatcaggtgttttccacctttagtgatctcaagtggttccccttcagttgctaaaacatagtgtgtcgtttgagcagtccaatagacccacagagatctgctatctatattggcagataaatgacagcagatggaattgaggctgtgttctgtctcattggcaagcctgcagccttagaagaagagatgtgcccctgaagcattatgcaggttgctcatccagaatcagagtcactgtcatagtttgtgaaagggaaattggcaaatctctatacataataggcaaaatgcaaccctctcaattctcaaaggcatattctcttcactcacatttttgtctttttgctgaagggaggtttctgggccaagatgttttgacagcctggtattttctttttttgcccaatgtgtaagaagataattaatgttaccattaatgcatgcaatgacattagaatcaattcccttagtgatatatatgcactaggaaatgaacacaaaagttaattaacaatttattgagcatatactatattacaagtttactatactatacaattgtgcttttttattactattggtgaaaataatgaaagatggcacttttctattcttcaccatatacaaggcacagttccaaggatttaaaatctatcaactttatgaatctttacaacaggaggagccaagatggccgaataggaacagctccagtct

SEQ ID NO: 111 - DNA, 1800 bp, synthetic construct
  misc_feature 1..1800: note = Description of Artificial Sequence: Synthetic polynucleotide
  source 1..1800: mol_type = other DNA
gtatttttagtagagatggtgtttcaccatgttggccaggctggtctcaaaatcctgacctcaagtgatccacatgcctgggcctcccgaagtgctaggattacaggcgtgagccactgcactggctcaagtctaccagttcttaacttgtgctttcctccagacctaccttcgtacgctgggacagtatccatgggtctcacttttcctgaagcgggacagttaagtggctgaggagggagtggccctctagtttctgccccatacctagctgaaggcttcaggataaggagaataatcactggtgagcagaggaaacctatttctgctctggaaatggctcttctctccctttctcttcccccacctccccctgctaccccccagagttctgtaccaattaatcagcagacaatggaagctccagctgggaccaagtgggctggactcattagagcagaatgacattaatatcaaaaatcttttgagacaaatgcaatgattcagggcagacgcctatggagggctggctcagaagctggtgtgggtgatggtaccgtggtccaagacagagagagccgtgcatatgtgggtggacaaccaggccgggtccctgggatgcctgaggggaagagggggcaaagcagctctgccttgggcagggtccctgtcctcttgtgcagcctgacttctccctcctccctgcttggggggcctgcatgggtcactgagtcaccgaaaccctgggcaggctggagaggcagcggggcatggaggccttcagggctggatgggctggggccgggtcccagctgcatctcctctcacctctccctgtggctccagcaactcgcttcctgtctttgggcctctgtgtttcttcatctgaactatggggtgataatagctgcctctcaggctggtgagaggatcatggaatgaggtggacacattttgtagaatgtggactagaggggagcgaagggcatcttcaccatctcctccttcttcattgttctttaccaagtggggataaatatcaaaagtctttctttaggggcaacaggaatcaaaccagctcccgcagggagccttagagatagttttgcttggttcctatgctcttcatttcttcactcactcagatattcattcattgagtcatccactcacacgtgtaccgagcacctctcacattggcatggatgtggcactggggataaaaaggtggatgggacaccatcgctacctcggagggactcttcggctagtgaggaggctcttcctgcctggaggacacgcgtgtggtcagggagagctttgcagaggagaggccacaaagctgtccttgtggtttaaggagtttgccggtggcctggggtggggcagtagggacatcatttatttgaaaaatatttattgactaactactacatgccaggcactgtcctcagtgtggggacacagctgtggacggcagagatgaaactctgccttcaaggagacggctttctggtggaagggcatagaagccaccgagcagtgagggggcagtggcagagctgctgtttcataccggctggtcaggacaggcctcggcgagagatgccatctgggcagagatctgcaggggccaggggagtggcccacagggataccaggagcagaggggatggcgggacgcattcctgaagtggaggaactctctctgggctccgggaaaagcaggacacccaagctgcaggggaggtggggggcgtgaggtacgatggggtgcgggggtagctgcacacagagcgc

SEQ ID NO: 112 - DNA, 1795 bp, synthetic construct
  misc_feature 1..1795: note = Description of Artificial Sequence: Synthetic polynucleotide
  source 1..1795: mol_type = other DNA
ttcaagaattgatcaataactgacagcttccctaatttttgttcctgcttccaacttaggaccaaccagagaaaaccaattatgcacccgtaaccaatcccataggataccacacttctagttagccctatagcatcctcatgccaatagcctccaaccagggcatatctgaagtcttccctttctgcaactataaagcttttccactcttctgcctgtatttgcatctctgccaaaatggaagtgacagttggtggctctcttgctgcagcaagttctgagtaaacaggctttgtttttctcgtttgtttggtcttcttttactttcacaaagcaaagcagcatttagaataatcttactttcagaggtggttggctttggctagctgacaatagagttcctagaactgaaatagttgggcagcctatcagagtccaaattgatctgtttaagcaggaaaactctaggcctagtgaacagaaatctgactgaatcacacagaatactcacagccccagtgcagtctcagacttgagtcagttcacagtcccaggactccttgagtgaaaaggagaccaaacgactttaaaaaaggacgctgaaagaataacaaatacttatattgtgaaacttctttcagcctttactaaaggtacaaatggtcctttattggtcactatttttaattagaataaacaaaatatgtatttttaatttggcaagtaattacatgtccaattatgataaagtacattttctttgtgtggggtgtatgctaggttcaaaaatgattcgaatattaagattcaggagaattttgatttttgaactctaactcttccccaggtataaaatgaacatagataaatagtgctaaaatgtgagttagatttttaggtaacaatgtaaatgtaatacaaatttgaagcttaggaataaaaataaatagcgtctgattattttaaagtaagtgcttatttatgtggtttccaatgtgacttaagacatctgtgttttttcttgtttgcttgtgtgtatatgagagtgggaaagaaggggagtgaggaggaggagagagagggtggaggaaaggcagaaagttcaagaatgatttgtttgagagatgaagtacgttgcatagataagactatggtttgtttaaaagtatattaatttctgtaactatgtaacagagcatcccaaatttagcagcttaaaataccagtttattgtctcacagatctgcgggtcacaaatcctggcacagcttaactggatcgttgtgctgtaatagcgcgtcaggcaaggtacattctcattaaggttcacctgggaaaagctactcttccaagctccctcatgttgtctgtagaatacatggttgcttgtttcttcaaacgtagcaactgagaaagtctctgccctcaggtaggagtcctttataaggatttttccctcaattaagacaggctcaaccaggacaattcttcctcttttttttttccttttttatcttaaaatcaactgatatgaaaccttaatgaaattttcaaactttcttcacctctactctatcctattggccagaaggaagtcacaggtaccagctgtactcagaagaggggatcacatagtttataacatattggggtcacctaagaatgtatctgacataatgtgatataccagaaacccaaaggataagtggatggaaagaaaggcaaagcaaagaaggaaaagaagtaagaaatcagggagggaagaaaggcaagcaagcatttatgaaaggaattt

SEQ ID NO: 113 - DNA, 1795 bp, synthetic construct
  misc_feature 1..1795: note = Description of Artificial Sequence: Synthetic polynucleotide
  source 1..1795: mol_type = other DNA
ttcctttcatatagtcaatggctgtttacatgttatcttttgtgcatggctgatacatctcctttcactatgccttgttattttgtatgatttataacaatttgatattaaatcatctcacttttctttagcctgtaatattaatatattgcatgttctcctggtttttcaagtacccattgactttgtctcatcttatagaaggacaattgtgatctagcataatcaagatttccaattttttttgtatatgctttactacccctgtttaggaattccttctcttctccgtgaatatgagaatgcatattttctggtaagatatttatagttttattgttttgtagaattagcgtatttatatatctattttttccttaatagtataatatatagaatctaattttagtctataaagatcataattggatttatcttgttcctgaaaataaaaaaaagattttccacggagataaaataccactagatagatcgatagataagtagttagataatagatagatagatgtatgtatatgtgtatatctataggtatatatacacacatatatatgttcctaattatattcatttaattattatggtgtgtttatcatttcttcaagtatatattaaatatcaatcatataagatattgtacaatgcattccaaggaaagtgttcaatgtcattattctataagtttcctactaatgcaatattcttcgggaaatatgatacatttaattcaggtttgaattatgttgtgcctgacttgtagatacttttaaaatgcactactacagtacatctcagttatttgtctttgctttgagctgactcatcctgtatatgtcctggaattaatagttctatgagagttgaaagaggttggaataaaaagcaactgattttcaagatttagtttcctgtttgataaccttatcagtacactaccagatgttacagtaatcattttctccactgaagcagctgtgacttttatgtggaatacctaattggtcatcatgagggctatattactttcagctgcaggaaaagtcattgaaattggattaaagtaagaactgggttattgctatatggggccctaggaagctttgagcacttttaattgacttggaaccaacaaagaagaaaaacagctaggtaagttcaaatttgtgtctgcccttcatacttagaacatataagaagaggaaaatctagggagtgttcaagttcaaaaacaaatcaattataacaataagaaattgttaaaaaatgtgttctgaggttatataaaaatagttcagtaaacctaaagtaaaatgaaacttatggaaagacaactaaaactgggtagtgcaatagagaggatgggaaaataagttaatctatttttattgtacattttctcaagccttatactaggcactttaacgtataatatcatattttatgttcacaggaatcaaataaaattaaatggaaggagactgttctatgtagcatcttcccaacaactttctctcatttttttctggcatggcttaacagaattagttataacatgaatagattttctgtcccttagaaccttagaatagtttgtaaacaggtttttgtctatatagatataaacatctggtgtcttgaatattatgctgcatcttgttttctaaaatgcattcactctgcagaagcaaataaatggagcaatgagatcagttaagttttagatagtcttttaaattatttacataccaagttcatgcctatgtaattcctttgt

SEQ ID NO: 114 - DNA, 1794 bp, synthetic construct
  misc_feature 1..1794: note = Description of Artificial Sequence: Synthetic polynucleotide
  source 1..1794: mol_type = other DNA
gcttgaaaatagaagccacatattctgaattttagttcagttaattctggcattgagacaacatccacctcttgaagttaagcaaaatgtttccttagccattttgcaaacatattttaatcatgaataaaatatgaatcattaaaagtaaattattttgcataatttttatcctgtttatacaaatctagaaccacctgttttgcattaaaggtttttaaccctattaaaaagaacaaaaattaattttattatcatagccgctaaaaggcacacataatcttccattaagacatggaagcagcacgagcagttccatttttagatgctcttcatctctaattctcaacagctctgaacattagcttaatacagtaattgacttccagtgcacctggcctggcaggtcttgttgaatgagatctgaaagtgctcaattttacaggtcatttaaaaagtattgtggtcttgctgatttcttctggacacaagctgcagcggctccctttccctgcagtcactgctttgcttagagaatgacttccttgagaaccctgcaggaaagaggctggctttagagctatggctcctgcagattctgagaggggtctatgtattcttggattgctctgtaaaatattcatataatatattatgagcatcttaaaaatgagcctacggtattcagtgtaatggtttcttgccggagaaatggcttgggtgaaaaagagataaagactcttagtgctgggaaataatgagatttacaatcctttctattgatttctgctgataaggtatgtgataggtttctcagccattctataaggattaaaaattaatctactttgattattgtcattatcaatatgcttcttaattagtaacacttttctctgaaagaatctatatactttaagataagaagggcacacagagaagtgatttttttttctaaatcagttttgtaaaacctgaaaagttttatgatctgactttttgtcttctcccagaattataggtcagaagcaagaatttagagacaaaagcagttttctttgtgtaattcaaccattttataggctttttcttgccatccacgtgggcaagggcaagaacaaggatgaaacaagctcatgcttaattcccctacgcccaaaatgacacattattcttactcatattctatgttgaaatgagtcacagaaacccacgtagactcagattgactgacaattttatataggcatatgacacacgcaggcgttgtaaacaataatatcctttgacatattcacagacactttttgtttactcattattttttctctcatgaaatgaaggaaaaaacatttcaaacacttagtaatagctggtcagctgaagtggccagtgaaacaatcaaacatttgcagtctcagccatatgatcacttagcttaagtatgtcgtgcagccaccactgggaagagcaacctgtttctattctcctgttctctttttaagcgtaaaatttaccttttcaatgtgcagtcctgtgaatattaacaaatgcgtatagtgttgtaaccattgccacaatcaagattcagatcacttccatccccatttcctctggactccctggctctcctatggtttcttgatttcttggtcttcatgcaaaacatagatctggggagaaaactagtctaaaatgagaatgaatttctttttgttcttaaagcacaatttggactgctggtgcagccttttggtctccagtttcccttctgctctgttcccctttccctta

SEQ ID NO: 115 - DNA, 1793 bp, synthetic construct
  misc_feature 1..1793: note = Description of Artificial Sequence: Synthetic polynucleotide
  source 1..1793: mol_type = other DNA
gcagggcacagcctggttaaatccaaactaccatccactctgcccctgattccatgtagctgaacacacttatattagcatataaacatggtgaagtttttctcattttttaaaaaagtcttctcttttattttccaactatgggctgtcccatttactcagacttctatgaaacaaaactttgaagcatctttatcctgtcaatatccaatttctttgtcaatccttctctcttaaatttacttatctggctttgacttttccacttttcagaaactactcttgtcaagtatgccaatgacgttcacttggctaaatctaatggtcactttcagtcttcttatattagaccattctgtaccatttaaccaagatgagtgttcacccttatccttgataacttttctgtatacacctagctttcaaaacatcacactcttgatttttctacccctccaaaatttcttttcattttcttttgctgtctgtgctccttctcaccaaactcttaatatttcagtgttcccagttcaggaattttatgttttctgtctgaatccagccctaaggagacaccacctatatgctgacaatatccaaattaatattttcatctgagacctctctgcaagacactagatcatatataattttataacttcctgtgtaatatctctacttacacatctaatggctttcaaaactaaacatatctgaagaaaaaaaaaaacccaccatgctacactcctttattcccatctcaggtaagagaaaatctatcctctagttgctcaaaataaaaactttttttttctgtttcattttgaatagtttctactgctctcttcaagttgagtaagtttttattctgtcatgtctaatctgccattaactccatttagcatgtttatccctgagtcattatagttttttttctggaagtttgattggatcttatctatattttctatgtctctatttacctatttatttaaacatatgtaatgcagttataatagctatttcagtgtcattttctgttaatctaaagtccatgtcagtgtttattgactaattcttgccattttgtgttgtgtcttcctgccttgagtcatacttgattatatgtcaaacactgtggattttaccttattgagtgctaggtacattttcattcctgtaagtttttgagctttgttttggcatgtagttagttacttggaaacattttgctttttttcatgccctgcttctatgacttttaggtagttctggaatggggctgagtctctggctaattattctacactacttgagcaagagcttcctgagttctctactcaatgccctacgtattatgagtttcactagtctggttcataggaataagcattgataccacccctattggaggaatggccagtatttcctctgtccattttgaaagttctcttccaagatgggagtagtttcctctgatgtttgctctgatgaataactttcagaaaactcaaggtgaaccatctgcatatctccagtgttctctctctctgtgcatctctctcttttctggtgatctgttatatttgtctgttctcacactactataaggacatacctgagactgaataatttatgttaaaaaagaggtttaatggactcagagttccacatggctaaggaggcctcacagtcatggaggaaggcaaaggaggagaaaggcaagtcttacaaggcagcaggcaagagagtatatgcagaggaacttctttttataaaaccaatagatctca

SEQ ID NO: 116 - DNA, 1789 bp, synthetic construct
  misc_feature 1..1789: note = Description of Artificial Sequence: Synthetic polynucleotide
  source 1..1789: mol_type = other DNA
gctgcacacagagcgcctggggcatcgcctaaaagacctgcttgctatcacttgcactgtattggaacgcttagatgatacgggccactgagtgttggttgggtagggcttcctgtccacgggaaccttttatattcccatcccctcctcttccattcccaactagcctcctcatcctctgggctcaggtagtttgcccacagattttattagcacttaaggtactgcactgaggtggcgagcttccgcggtagggcagcatcatgcgggaaggaatcatgattcaaacccaggctctgtcactcggtagatgatgttgagtgatttgtgcaagctctgtgcctgtttcctcacatgtagaatttctcttggaaatatgttatcctgcataaatccccagtggtgtggcagctccaaattaaggtcagtgttcccttcacttaccggacacctcaaaattagtaccttgtagaattaaagaatccaccttggaggctgccttccagaaggaataatctgactcttgtccaggttgaacaagtttactgggaacaaaacaactgcctctgggtttatgctcgtctgctcttttaagcagtgaaatgcttgtgtccaggagccaagtggcagtaacctttgtgacttcaattcttccaagaataggtgtttcttaatagccctgattgaattagaactcaagtcccagctggttgccttccactggccagaaactggctcctggaactggctcgatggcctggcccgactatctcaagaaagctgcccctcctgcccagcaactgggtctcatccaagggcaccttgtcccattgctgtgttcctttttatgagaaccccatcctgaaactgcataattgcaagcttagaaaaaaaatagaattgccataagatggggcaaaattagaatagcttttgggtttgaaagttaaaactcattttaagtatgcacagacaattgtctgagcttcttctcttgcaaacagaagtcttggggagctgaggtgagtttagacaaataacaatcagtcttccttttgaagtgagcagggaccagactgtgcccctctggagagggtctatgagtgccccagtcctgtccagactcagaagagaaaagaaggccctgagggcacaccaggaaatgtgattcagccaaccatgttttgagtgcctactctgtctgtgcctgagggctttcgttctatctaatacatgggaccagatcacagacgggcagcttcgagaggtgaacaccaaaggggctcttggctttccgtgccatttccatagagttctccttcagctcttagccacctgcgttgaggctgtgagggcattggaacagcacagtctcccagtaagaccacagtgtggtggtcaagggcagagactccagagctggaccatctgggctatttctagttctaccacttactagttctgtgacctcattagaggctaagagttaaggcacatcccttaacctctctgactcagtttcctctttggataaatgggtgttaagaatagtgcagatctcatagatttgtcatcaaagaataagtgaatcaagtgatgtgcaaagcagacagaacacaagcgtgcacataaacacgtaccgccatatgcatgttggttctacaaaataaatacacatgatttgcttctatttattgataaataaataggatgtttcccttggcgacacttctggagctgggctctggaagcgtgactttgagaaaggggaggggacagtgggacctga

SEQ ID NO: 117 - DNA, 1787 bp, synthetic construct
  misc_feature 1..1787: note = Description of Artificial Sequence: Synthetic polynucleotide
  source 1..1787: mol_type = other DNA
aagagaggcgtaaaggaagcagtttgatattcacgtctgaaattaaggagagagacctgggctggagatacacatttggacatcattctcaatacacagggtagtaacagtcatgagaaagaagactgaggactgagtggtgggacatgtcaatgtgtgaaaggtaggggatgaggagaagcaagccaaacagactgtgatggatggactagaaaggcaggagaagccaggtgagggagcgagatcctgaaaaccaagagagggaagtgctgaggagcagagagttagagagttctctgttgagtcaggcgttgccgataggttgagtaaaacgaggtctcagaaattaaggctggatttattaaagtgaaaatcagtggtaaccttgagaaaaacaattttggaggagtgatgggagggcaaattactggagtgacttttagagtgaatggaaaggaaatgtgagccccttgagtaaggcagttctctcaaggtcatcatacctaagtggcatgatcatgaaccatctaattttcttgcggtttagctgcatttttcgaatcttatatgagtatacagtctaacactttgaagatcttttaaattaaatacatatggcatttaaaaaatgcaaaaccaaggtattataagtttataaaattacagaactaaaaagactacctgaacatttctagattatggaagctgatcatcattttgctcatagttataattaaatatcacagaaagactaaaagtttcatgggcagtattttgtgcttgataaaagccattcaactctaggatattttatcctcatcaaatatacagagtaatgactcatattaaaatactgagttccacaacaggaataaaaggggatcaatgaaggaaacaatcttattatagaaactaaatttttgtaaattatataatatgaagtccttaacgtgtatgtattcacacaagtcatggcttcctgtaggatctagtcccagcactgaaggtgtcaggtgaaaggaatgacacactactaaattaacattcaagaagaatttaccaatttcatttacccacagcgtatgagaatccctttttcctcacatttgtcaacactggttatcattttttaataaaatattgatacaattgaaaaaatggtacctctttttttctgcatttttatggtcaacaggcaaggctgaatatcccttgtaaaagtgtaaaatttgtcaatcatgaatatttgcccaaatttggattacttttatagtacagtggaaatgatctactgttaaatattgctgtaggcttacctatcacactcttcctgctctgtcctaggaatttgctgaccatcagtttttccattctctccttgttgaattaacccattatcaatacggtcatctgtggagacatcatgtaggtttcttgatgcttctgtttcattccttgcatgtgtcttcctttctccctccgcctttagtgaaagtttcatagataggatacttgttatcattttattcattgaaaaattgttctgttttcattgattttatcgcttcacagtttaactttcacaattttagtcattaaaatattttgtacttatgttatcattatatataggattatatatagaattataagatataagtagcataattttatcactgacatttgtataaagttagcttcatttctgtgtgagtgaatgtgacaggattttccaaaatttcaaaagggctcttctaaatttagtccttttatttccatccattctt

SEQ ID NO: 118 - DNA, 1784 bp, synthetic construct
  misc_feature 1..1784: note = Description of Artificial Sequence: Synthetic polynucleotide
  source 1..1784: mol_type = other DNA
aaaaaaaaaaaaaaaaaaaaaaaggaatgaaagatattaaggatgaaatggccggtaggtggcccagagtgtctgtctactcaaagcctctctacgatacttgatactgccaaggtgcagaagagccaggaggcaggcatccagtgggcaggaggggctggtcccagaactcagcttgcctggccctgcaccagaacagaccagggttggtgtagctggggaactggggcattagacggttctaacctgatgccacgtgcatttgctgcctgcatttcccatgaccacacccgtattctgagttccacaagcaacttctggaaattcagctccctctgcacatagtccgcaggacaagaatatgccagacacctaaagatgaggtcctcttggaaggaacggggcatggccctctaggtgacttacaccccaggctcgtgggcttggctcataagtctacttacgagactggcctgctgcctgccagctgctggggcagggcagctgagcctgccagcctcgctgacccggccccagattgctgctcacagtacactcccctagtcctttctcagaggagctccctctgcagcaccttctacttgaatgtccttcctctgagagtggagaggagagcagcgcctgctctctttccagagtcttgaaagagatggttgagatctggaggagtctgggcacaggaaaggcccaagaaatgcaggcagcaacactgcccattcctccttggcattttggggtggaaaccttgaccctgacagcccatactgccctgctgcctgcattcccactttcatgatcacaggtgggccttgcacacctgaggccctccaggagtgcttggcagctgagtgttctggccccactgcagggactctcacctctgcacagggcgcagcccagcagctcctcctccaaagtaagcctggaagtaagttttactcacaagtctgcagggcccaagtccaagtgctctctggtgctgtcccagcccgaggagtcagcattttcccagtcatgccctcagctccgacctgctagggctccccaggataccaggcagcctgtggctaccatgttgaggggagggggcacttctggggctcatgagcagtttggtttcaggctgttttttggaaacacttctctttaatgagtgctacagagtgcttgggtgcaaggagccaccaaagagtctctgggtacaatgacccctgattagatggaacactcagagaacgggagtgagtctctgaattttctaattcatcagagatgcccatgactttatagaaacagggtctttcaatactttttattgaggtgtctggaagtcatgtctttgaagataaagttgaggggtctggggaagaaggatcctaggggagacatgagaacagctttgaactatcccaaagtctgtcattctcacgagccggcagaccaactctgtgactccagacaagggccaggacccatccggaaaacacaggcagcaggtgttggtcccatgaagggaggttctgatgcggaggagactccttaggagaggatgagaggtggaggaagtggaggaggaggagagaaggaaagagaaggtgggtgtgtgttgtgtgtctgaatatgtgtttgtattatgtggttgcttgatgtacaatttgtgtatagtgtgtgtatctgtgtgttatgtgtgtttgcctggtgtgtgtgcagtgcatgtttggtgtgcagtgtgtgtgtctgcataatgtatatgttgtgtgttt

SEQ ID NO: 119 - DNA, 1782 bp, synthetic construct
  misc_feature 1..1782: note = Description of Artificial Sequence: Synthetic polynucleotide
  source 1..1782: mol_type = other DNA
tagtacttagcacataaaatatgttaggcaagattctaagccacttagacctttatgtacagaatatgtaacagagtaaaataaataacacaaagattcattgacaatgacaaattgacattttttcaatcatattagatgatattaaaaccattaacaaatttactgctttgtttcataattaaaaagaatgctaaataacttcattaaaaagttcgactaattaggtatatagataaatgggcaggatttggaccagaacacagaggataaaaattttcaaagaccagacaaaattatttatttattttttggggggagagatcagttttattatctggggatacagtggggtcctctccctgggaggtgggtcttccactggttatccccaccagggctccagggggcgccatgagattcagtactgggctccgctgggggctgggccttggagaaggcgaactgtgcagggaagcaacagctgtggggtcttcaccgcccgctctgcccagctgcacccggcctcctggtgctcctcaggctcccgccgagtctgtgtctctggagggcagcgaaccatcctgcccagaaccttatcctcacattccagtttgacgcaggtcagccatttctgcttcctcctctcaggctggactttgcacttggctttcttccagtccttcctcgggccacttctctgtctgccggagcttaaattccagcctcacaaatgttccagatgggaagggcgtgtccagggcgctgtccacactggtctcccggaaggcccgctgcacgggtgggtgcttgcagattcctccagggccacctgcaggctccggcgctggcccggtgagctcggcccctcccgcataccccgcgcccacccactgggccagcaagatctgcagccgtctcaggcttcccctgtcaccctggccctgcgaagctggtgtgcgccccttagttctccgagcctgccaggagccacctcctcccctgccctgcccctgtgggggccatgcccgcagaacgctgggcagaggcgaaggaaccaggaaatgtccctttctccacactgaccttggggtgtactgggtcttctccactccctcccaccctgcccgtgctgttccctggggcccgcagtttcagcaaagttccctaccgcgccgggaagccgtcctgttgctcactctcacccttcctcgttttctggcccattctctctccccactgggtctctcacaagaccttctctcctcccggctgtccccggagcccctctctgcttcctcagctcagccccttctctgatggcttctccctcccacccccaagcgaatctccaggctctcaaggggtgcccccgatccccggggcctaggtcaaccagacaaaattatttcaaatgggaagatttgaattccattgaattcatgaaagcaggaatccatctggtcatattttaaataattttgaaatgataatagcaactatcaatttaaccagaattcagaatacccaccattttaccagaaaaaaaaaaaacctgttataactaaacaactaagtcagtaaattttcaggatacaatattaacatatgaacatcagtggcatttttttacagtaacagcaaaatatctgaaacagaaataaagatagttccatttacaatattatcaaatagaatgaaatacttaagaatgagttaacaaagaatatgaaagatctgcaggctgaaaactataaaatgttgaggcgctctgtgtgcagc

SEQ ID NO: 120 - DNA, 1774 bp, synthetic construct
  misc_feature 1..1774: note = Description of Artificial Sequence: Synthetic polynucleotide
  source 1..1774: mol_type = other DNA
gggaatagtggggaatggatctgagtgtgccaactggcaaatgaccaatataaaaaattcacaaaaagtctctggccctacttatttcacaggatatcagttagaatcaaatgaaatgatacatgtaaaagccctttgtaaattacagagagctatgcaaatgtacgctggtatattcacgttttatctggcagtcaaaaaaatctgcatttagctgttatgaattctctgctgacctggatctgaagtggagtgtggactgactgcttctcgagggatagtccttgaggtgtggacgtccaaaaggctgccagggatgtctgggggcacatggactgtaccgtgtgatacaaaaccttcctgcagaagataagcttctgggcacctgtctctaaacctttcccatcagaccagttgagtgcacatgagcatggctcgtaggcacctgggcatggaaaaggacctctccagctctgcccttcttggcagtgagcagttagcggccctgaggaatgaagccacagccgagtgaaggcgttccatgctgtccaggtgatggagggaggaaattgaaaagacattcaagagtttcctgagctgagctcttcccctagcatcatgctgttcatactacacatgttgttttgctcctgatgataaaggagatgctagggtaatagggctgacgcagttgaaccctgtagtctcttcagccccattaacccacatccacccaaatggattctcagccagtcccattaagacatcctgtcagaaccttcccacgtcatttgcagagtgaagtgaatatcaataaaattgtaacgagtaattatcccagcttcactgactcttactggaaatgaagccagccctctgctgtgggtattgacaaaaactccattcctcctgggagctgcttttcttccgctgggtaaatctgatccatctcagcagataccaggtgtgctagtttaacattcatgggcacatgggcagcaggtttggaaaggggactctagcccctgtcccttctgggcagtgagcagccctgatgaatgaagaggttcactgctctccacgctgcgtcaacagagcgagtgttgcaccaggaggcagggcacctggcttccccagtcactatcgactactcccaccgtccaccctaactccatcaggcctcattattccatctataccacaataggtcctttccagttctggcattctatgagctgagagacagaacagccacagagaaatcaatctgccagagagtgatgcatttgacagtgtagacactcgaggcccggtctacattgccaggcatttgagaagcagacagaatgggagctttgctggcagtttctcaccgtggctttctgaccacagagagcccgagcatcacacctgctctgtggtcatgacagccagcactgggataccagagctgtgagtgacaaggtgttaattcaaggcttagggagtgtgatggttagggactggcccaccctttcctgttctctgcctgctgtctgaaaggctgtcagcacctcctgctgatggctggctgctggtgacttgctgcctgcttcccccacatgaaagtgtggaacacagcacgaaggtgtttctgcagcacctgggctgctggcttggaacgtgctacctgtgggggaagactggaggactgctcagttgctgttctgtgctgggattccagcctcctcttcctggctgctcaggaaaagacagcacaggccaagctggggtt

SEQ ID NO: 121 - DNA, 1771 bp, synthetic construct
  misc_feature 1..1771: note = Description of Artificial Sequence: Synthetic polynucleotide
  source 1..1771: mol_type = other DNA
ttgaactcagaacatattagaagtgagagaaacctaaaaaagtatgtagtatacctccactttatatacgaggaaactgggatctagagatactgcttttgtgacctgggctgtttgaactgaaggtatcttacattactaagacaggtgactttgtgtgttacagctgacaacaatcccccttgaattatcaggtttctaattaatttttttcaagccttaaaggacagtatcattcaagcttagttgttaaaaataaaactaataattgttggactacagtggtaaaataggaaagctctgattagaaaaaggaagagaagtgataaagaatacatttcataataatttggggtcaccatctataacccaaactccctttgaaggacggatgggtttgcatagagagaatttaatgtaacacttagagtttgaggacaaggacagcaggtctggtactgctcttgagtttccaatcagaaaatgatcactgtaacggtacgtcaatttaataaccattagatttactccaaattagatattttcatgactcatatctgacatccttgctgagagtttggcagcaaacgactgtggcagagcccccaagtggacgatgaaagagcagcatctgtagcagcagtgagagggcgcaaatccccaagtctaccagaggagagagctccgggctgaggaaaccctgccaacacggtggagcttccagagcccaataccagagcctgtttattacacagctaagaaagaataaaagcgatcctttgaaatgttggtcatccctcaaggtatgttttttaatctcctaagactctgactgatctctctactatggttttttgcttttttaacatccaagaggataagatattctgccccaatacaaacctgagggatctgacacttcagacatctggcagagattctgcttagaaagtagctctagattgaaggctattatcccaacgtcacttcagtcaaggtgtcctgatttgctttgaatttaatttcctttgattggaatttttgaaaaaaataacaagaataaaaagtaataggcttgtggaagtggaaggcatgccaggtttctgcatctggtagctcaaacaaggtgagactttgaggccttgggaaggaaaagaaggcagggaagttgctaagacaactgattaaatgacaacctgatgaagcagaaaattctctaaatccaaggtgaagaattgcctcaggaagcaccaaaatttccatcagacacacattgcaaaaacaaaggtcacatcctatccaatttttaattttttgtttttgacgtgtgaagcatgcaaattagaagaaaatgcaggcaattatcaagatcacttatacaatacctatcaagatcacttatacaataccaatcctgtgccaatacatcattgctcttgctttatgcttttgtggattcctcaagattataaccagcttaaatcccatttactacttgtgctcaaaaataacattcatgtacttaaaagtaacttcttactgagatatgttagagaggaaaaattaaaactatggttatttttactgaaagttacgaataactatcttaatgattcaatggaaaagatggaaacaagaaatctgactgatttaacaaaatttgctctctcctacctaaagtaaaaagcagaatgagacacattcaacttagtcggacccctgacagaaactgaatacattttactgacccagagggcgctctgtgtgcagc

SEQ ID NO: 122 - DNA, 1767 bp, synthetic construct
  misc_feature 1..1767: note = Description of Artificial Sequence: Synthetic polynucleotide
  source 1..1767: mol_type = other DNA
gtgcacaggacctggagcatctctctttggattaagccccctcctcaggattacagggctcttcatttttctcaacaggctgttgtaccagataagcacaaaaacttaatttcattatgctttgctttttttaaaaaaaaaaaatgaaggtaataattttaacaataaacatattacaacctgctacacatgagacccttcttgtgcttcgacctttcttctcaggagtttatatgtattacatatattcagtttttttctgagttggaatgcttattacagattattccccttattacagattactcttttaatttatctcttagaatgatttttcgagagcccctgcctgcccgcgcctggtggaatggagcggcgcctgggctgagccaggcgcgcaggggcctccgcacgtgccgcgccggtagcagacgccaagcgggcggacagtgagcgtgagaggccgggtcggagtggccgccggagcagtgccggggatggaagaacagcccatcttcaccaccggagcacaggtcttccagattgaccccaacaccaaaaagcactggatgcctgcgagcaacaggcggtcaccgtttcttacttctatgatgtcacaaggaacatctatgggatcgtcagtgtggacggagccaaggtgaccataaacagcacaatcacaccgaatatgaccttcaccaatgtgtcacagacgtctgggcagtgggccgacagcagagccaacacggtgtttggtttggggttttcctctgagcagcagctgacaaagtttgcagagaaattccaggaggtggaggaagcggccaagacagccaaagacaagacccaggagaacatggagccctcgagtaataatcccgagaatccgggcatggagccccatcttctactccggcatccagtgtcaacgggacggacgatgaaaggcctctcaggccgctgcagctgacacgcacctgcagtctgggaaccacaagctgaaggcggcctcgacgcagagagctgcccacgggaagaggtgggagatggagctgcagacccggcgggagagcgacgcccggctgcccacggcgctgcaggagtcggtggccagcgtggagcagaggaagaggccgtgagatccacagagaggagaagaacacgcagctgaagaggaagatcgaggagctggaggcggagctccgagaaaacgagaaagagtggaagtccccaaaagcaaagtaaaactactcctcagctcaggtgagtgcaactgtgtctctgagaagatggaggcggcagagagaggatcaaaacctggaagacaaagtgcgttccctgaagagagacactgaggagagcaaatccagacagcgccacctgggggtggaggtgaagagtttcccggaggtgctggaccggaagatccacaacctgcctgacttccgcccaggccttgcatactgtgcaccaataactagggctggccgaggcccaggcccctcctgtgagtcccaagcgtgtgtgcgagaccagatggcgctaggacgttccctgtgtgcgttgcttctgtaaatgcagacgcagtttgtcgtgtttccaaaccagttgtgccgtccactcactcctttccagagtagaaatctcctctccgccgggcgcggtggctcacgcctgtaatcccagcattttgggaggtcgaggcgggcggatcacgagatcaggagatcgagaccatcctggctaacacggtgaaaccctgtctct

SEQ ID NO: 123 - DNA, 1757 bp, synthetic construct
  misc_feature 1..1757: note = Description of Artificial Sequence: Synthetic polynucleotide
  source 1..1757: mol_type = other DNA
gcgctctgtgtgcagccaagcagcttagatgagtttcactacataaaagaaaaaaagtgaaacaaatgtgcagtgagtaagaagctggtacatttcagtgcagtttatctcagctccaatcattcaatctgataggtggtcaactgctcagtagccaaatggactgttctcgactccggagagaggccacaaattatctggcttctataaactcagacaagatttaactggtaagaaacaaataaagtattgaaataaagtattctaatcaattcattaggagaaatgggggcggcctctgtcaggcatgaagatatgaaatatgcgtcataaagcattcgtgtgtgagtgtgtgtgcgcgtgcatgcgtgagtgcagatacatgtgtgtttgtgtagtgccaggcctagaagatagataaaaataacacaaaagaatcactgagtacctcagatatctttgaaggagcacatggaccttgtctcgccctccccaagtgcccaacatatccatgcggtcagtgccagctttgcacagttaaaataaagaaaacaaatatccaaatatccaatatcattgctgcaagctggccttgggtctttgccgacatctgacctgcttcacataacctcctggcctctaaaaatagatattctgtggtacatataatttttatacgatgactaatacaggaatgcccttcggggtaacttagtgtcttagtttctctcttttctctctatatttatctatgtcttcactggcctctttaaataaaagttagtctgtagccatggatcaagaacattagccaagaaattatttatctatgccttaaagggctctactcttcttatcaacataagagttgctcatattttttaaagggggcagagggatggtctcagacctgttttgtatttctctgcctttacatatcacttttccagatccaacggtcagtcagaagaggtttccacccaccccactccttttctattttatatacaactgagtcaaaaatagaaaggtaaattcttggactataaaaatattccttatattaatactacagcttgctgctctaaaccccaataagaagggtagtgtggtcattcacaaccactggaatcttactctgaattttactttcgtcctctggttgagtgagagggaggaagacagaggaagacggcagggggagggggaatggaaagtatgacatctgttcagatcccctcattgtccatctggttcataacccaaacttttgtccggaggtaggaattccagaaactgaaggagaaagtctgctaggggggaaaataacagagatccattcctgacttcccgtcacctttatttcaataccagtgacctctccgccacctcccagtgacctctgtgccacctcccagccgattagctctgcgtgtgaggatgtggagagatgaattttcttatccagtgatgtccttcctttgaaaataacattctccctcctctgttgccatcaaaacaataactgcttaatgtcagtgcactaagcaaggtagtggcaagatccagggtgcccagagacaacagagggcaaggaaagcctgggaaattcatgccctcctgttcatgctcccctcagctcacctgaaggcctcactgtccccatactacaagctcatcttacaagagccctttgactctgcttatattgtaaactacaatcccttgaggaaagagatcagaatctacttgcctag

SEQ ID NO: 124 - DNA, 1751 bp, synthetic construct
  misc_feature 1..1751: note = Description of Artificial Sequence: Synthetic polynucleotide
  source 1..1751: mol_type = other DNA
ataatgaacgaataataagatacatctgcagcttcaacttcttatttaccaactcacatatcttgttgccagtttagcgtttcaagttgattgtctcatgtctcaaacttcagaaatagaaacagaactattgatttatgttctcaaatctgctcagattgtaaatctgtaaatgtcagtaaatgacactatcatgccttgaattactcaaaccaaaacaagtagtttactattcctatcctctatgccttgctgtcatctaattcaatcccattgttgtcatctttacatatatattaccattttgctctctagccgtcatctcaactaccatctattggggtaggtgattcagacataagcttgaacttacaagcttgtatattttccattcctgcagtcttgaaatttgccaggctcttgtaactcatggtgattcctaggtggggaaacttccttgcagggacaaagtaagagtgctgctaaactagaagttgggactagcagttgactttgggcccttctccagtgttctcagtggtaggtttagtacagctaagcatggtctggtatcacagaaagtggtgtctgttgggatacttttgaataaagtctacaagcggacagtgcaggtatttctttggtggtttctcatcctaattgcttctaccacgtttaggcaagatgagtatgagtttgcctaaggttaacaagattagtgatgcattattttgacactaaccttctgtggcttccagcctctctttcgggctattcctgagtcagggcaaatagtcatgaactgtgaaggtacagataggagcagtgcctcgtatggcaaaaagcaattgagattacatgaggcacagctacgggaaatcttcccaacgctttgatgttatgtgtatagggctttgtggaactctgcagatgcctcaaaattgtctactatgcaaaaagccacaagtaggagaaatatcctattctagaatgtcttcagagagtactacctcactaattaatttatgtatagccatggaggttcttaaagataatgtggacccacacaattgaatacatgctcaggtccagaatatcataacctgaaattcaatcttctgctggtttgtaaaagaagagagaataaacatctgcctgcccagggatgaagaaatccttctgtaagttgtgccataattaccgctggatagaagaaatgttttgtatcaagaaatagagaaagagaatggagaaaaaagagaaaattaagaaagagaggaagagctcaggaaagatggggaagttgccaagaattgcaaatgattactcaaaatgatgagtttactttttgtgcaaatataccactcagtttctcatggactgaaatatttgctggcaaacaggaaggaacttgtcagattcccaattttaacaagaagagaatgatgaggaaatgctctgatgacaactgtctatttgaggagtttcacagtaagaagttgactctgactacacagtgcaccagcctccatttggctgccatcatgggagccagctgcacaagggctaccccagaaattggaggagaaaaatatttgccagatgaatagtaagccagacgtagtgaagaggactgcttgggtcagatagaaaacttacacaagagttacctaaacttgagcagaaactttaaaaaaaacaaacaaacaaaaaaaacaaaactctacaggtgatttctatatatggccctg

SEQ ID NO: 125 - DNA, 1747 bp, synthetic construct
  misc_feature 1..1747: note = Description of Artificial Sequence: Synthetic polynucleotide
  source 1..1747: mol_type = other DNA
ttattcatattaagaaacagatccagttttgttgcttcaggaaaaatgtgctgtaagaataaatgtgtcttaaaatttgtcagacctggagagcagactttttgtccacgcatctcttctttcatctacccttctatttgccaactaactagctccccgtcaattgtcaattgccttagctcttatgccattatcactctttcacatacaaatttggttttggtttgcatggcgcccactccaactcaaggcctttttacaattacgcttctttttttttttgtattaacatctttggctagcctttggattgaatggtttaggctgaggcaagtaaccagcacttttttctagacaattgtgttgggaaagtcacacagtgttgaacatggccatttagacagtaacagttaggtttccagaagggtcccttaaaagccagactatggggagcaggctattatgccacttaaaccttgtcttgggtagaaaaggagatataaaacctagaggagtgcattgtgtcatacatatggaaactatatgaaatataatgcaatgatttttgcaacgtgtgtcatcaaaaaatagttatgggttaaaggtttattacaaaagttagatgaacattaactgttggcaattattcctccaagggcataaaatctcaattaaacaaaaccaaatactttctcctttttaaagtgctgttttaaaagtatacataaaaggcatatacatcatactagaatgaactacatgcttatttatagttactaactcatgacagggagggggatttaaaataagtaaagttaggagagttagacttgcctccgaaaatatggtactaggaatcctaggagagttacataaaattttcttctttcctttttgctcatttcagtatcaagtatagagaaaagaaatacgatacttttccaatcaatattttgaatccattgtactatattctttgtttttccttctgctgcagtgtgtatttagaaatatattcaccattgaagaggagctggtcagagatcttgctctcaccagcacattttatacaggtcgtttgtccagatgaccatttcccatagcctatcacagctatcttacgatcttattccatttcttgatagtattcttaaagtcatggctcctggactatttttccctgctctcttgccactgtctgcatgctaacaccttttacttttgaatcagacactattcattgttgcaaactcaaggtcattttgtgaaactgttctgtactcacagatgtccaccctgaatcaaaaagcattatgattaaatgaaagaaaaaacaatcaattagttaagatatttctatcaatttgggcttaccaagttatattttattagatatgcaactttaagtaagccacctaaaatgtaaaccaatttcaggtgaaaattattgaatttcaatcttgaagaaagtaaggaatcttcctacttaagaagttcttcagtcagtactgcagttcgtttgctaggagactttgaaatataccagaaaacaggctggctggcaggttggtttgtgctgcaagatattctgacaacctgtcaaagttctacttttctcacattctaccaacttctcttttctaaagaaagcatgaaatgtcaaaatgacaggtgccgaagcacagcagcatccagcttctgggtctattaccttaggagggaaggagctgaaaagttgtgcaagtga

SEQ ID NO: 126 - DNA, 1740 bp, synthetic construct
  misc_feature 1..1740: note = Description of Artificial Sequence: Synthetic polynucleotide
  source 1..1740: mol_type = other DNA
gcgttttatcagtatttttaaaaggcttcatctgcctatccccactgaaaataagactcgactctacctatgatccgaacctcagaatgaatgagaaagtccagagaggagcactgtgtgtctcctgagcacccctaggaagaggtacatgtcccctgtcggatctaccctgttcattctgtgggtacgttagcccagattcttcaccctgagaacattaagccctgtattagtcaaagtcaagctaaactcctgtggcaagttattccaaaatacaatggctaaaactatagaatcttctctctaaagtaacagctacatggtgagccatccaggttggagggtggcactgatcttcccggtcattctagacttgggttccttccctgtcactgctccagtggccccaaggtccctgtgggggtctgcatggtagaagctggggtgccccaagtccaacaattccgcctggtggaagaggaacaggacctggctaagcagttgggattatcacctcctctcccattccattggcaaggccttgggcgcccaccgggggagctgtgtggtgaagtgtggcaggcagtatatacctggctgcagttctgcgactgtggaggaatttccagaatctgcaactttgattttcattgcttgcagtctcttccacaagccctaaaacaagagtcactctcaactctggtgcttggggacagttctttattctaacccagaaagatgacctgagtgactagaactcagaataggcacctgggagtcccttaattagacacagggggtttgcagccatagttctacctgccgtgttgtaacagcgtcaccatcagctgctgaggcagggcaagtgacttgctgctaataacataaagtactcatgtctgcaaaccacttactcttttaactaaattagagagtaatcaaggttagccttttaataacatcactttcacttatgaaaaaccatacaagcttcctgagtggaataaaaagggagagtgatcctagcgggctggagcagccacgggtgtgtgtgtgtgcgtcggcaaagaacggcaaaggtgaaggattgcagtagtcaaagaaatctcacaggaggcagtaggttttaggggaaagagcttgaatgtgggcatcaaggaacttgggttctggcttttgatatgtcattaactaagttgaatgaggacattccttgaaagcctatagtgtgccaagcacatgcccagtgtgggtcttgggcaggccacatgacatctctcccttgcccatcgcctccaccctccgcccccaacaaaacagaatgttgaattcatgtcctctgagactttcttcagctctgctacaacatgattctaggaagtagaagctcaccttctgatcttgggaagcaaaataactgcggaaaaaaggaaggctgtacaaagaaaaaaatcccagtcacatatgtggtcttcctggcaagagggcatgacttgagtccaatcgcaagaaaatttcagataaacctaaatgaaaaatgctgtatttttaaaagtggggaggtggaattgtgtgcttccaaagtgtcaatgccaaaaaaaaaaaaaagaaagcacaaaaagggcatgaaaatgttgcaaatgaatagaggctgaagagacaagataatttaacccaaaacctgactctaggctggagcctgtaaaaaagagaggaaaattgtgttttgaaaaaaaaaaa

SEQ ID NO: 127 - DNA, 1739 bp, synthetic construct
  misc_feature 1..1739: note = Description of Artificial Sequence: Synthetic polynucleotide
  source 1..1739: mol_type = other DNA
caggaggattgcttgagaccagggatttgagaccagcctgggcaacatagtgactctgcctacacacacacacacacacacacacagacacacactcacaaacaaattagccaggtatggtggcccagctatcctttatggcagaggtggaagaatttctttagcccaggagcttgatgttgcagtaagccatgatcctgccactgcattgcagcctgagtgacatcacaaagataccgcctcaaaaaaaaaaggtaaatttgtataaaatatgtagctctaaaggactgagaataacaatgaaagttgaggaagagattcatggaaaataatagaaagtccagtaacagttaaacacatgtatacaatcacttgatttatgaatagtgacaatgccgtgtagagggattctatattcttatcagtaaatgggagtaaacactaactcatagggtcactgtgagaacttaagacaatcagtgtaaagcgtcaataaagtacccggtgtacttcattagcaatcaatttattgctcctgcttcttgactcacagatatttcttcaattttatttcattttctatgacttcaggccaaatttctcagtttctttccctgtaatgtgcccataagcagcatttttttctagatgtaaaattgctttattcaacatgtaagcctccttcccctcatttgaacaaatgtgtattctatggtttaacgagatcttcttttctctttggatattctagtctaaccattttgatttatacttgtagaaactttgtataacttttataactgcctatgatcacaggaattgccaaataaattctttagttagaggcctaggtaatctatctagagactcatagtttgaatgatatacaaacggaagtgatgggctccaggtgattaaaacactatttctaaaacactggaaaaaatcaaatttacctgcagaagaagatcctgactatgcttgcctgctgcttatttttgctgagcgaaatagatttttcaatatacagagaaaaaaacactaaaatgtcatgtgtaatgacctaagccaatcttatctgctttcttgtatttctttagagtagatcgtttttccctaatttaaaacatttaataatacttaatgcatgaaatagccacatgaaaggacaatctctgattgaatgtaagaatgataattgcacttgttgctgtggctgcttcaaaccatagaaatgtatgagagtgctacttaaagcccacttcctgtaaacatggaaaacagataataagaaatggtaaactggaccaaaaaacagtccatgagtaaaatacttcatttttgttccctgatttccatgacaactgaactggtacacatatttatttatccgtttttcttacctaggtgcctataaaaatcaaatcatctttaaattggatttagatccatcttgagattggtgttctgtacctaaataaaaagcatttaccctttcaacacatgtatataacttgaagttttattttaaatgaccaagtagaagaacagtgaacccgaaaatcagatagtgttgtaaaaacacattatttcaagcattctttcaattcacagcatacagaatagtgaatgcacccaattgatttctattttcctccgacaaaattactattttgttttactacccactgagactgaaaacaagttcaacagaacatatttaaagcaactttctgttc

SEQ ID NO: 128 - DNA, 1735 bp, synthetic construct
  misc_feature 1..1735: note = Description of Artificial Sequence: Synthetic polynucleotide
  source 1..1735: mol_type = other DNA
tgcctactgataccttcgctggttagatcgaggcattccgcaccccatctgaaaaatgtttaccagaagaaataactcctcagtttgggtaatctaaaagcctgcaaagtgacaatggcccatctttcacagcaggcgtaacccaacacctatcctcagctttaagaatccaatattaccttcactctgtgtggagaccgcagtcctctggaaaggtgaaagggctaatcctactctaaagaagactctagctaaatcagaggcctgactatctctaacacccatagcttactgcagatttgaactgctccaaagtaaaacgtataattaagtcctgttaacatgtggaaggcctttcctaacgacagatctcctaatagatgaaaagactcatcaattacaaaaatatgtcatcaatctaggacaggtgcaaaggcactccgtgcatatggaaacaagcgtcttcccctcccacatgggaggaaaattcagtttcagctcagctagggatttagtcttactaaagacgtgggaggaagttctccagctgagcagctttccccaacgtggaagggaccacgcaaggacacctgagttctccaacagacgttcaacgccaagggattcacaggtgggtgcacctgtgtggaagtaaagctgttgcttattctgggagcccaatctgaggctgggggaggtgggcgcggggttattttagcgttggcggagcactggccctgtcgctgcgctcctgctcctcctcgcgtttctcctgccgccctagtccagcagtggccatgagggagatcgtgctatggcagaccgggcagtgcgggaaccagatcggtgccaaggttggtggccggggctctgagggcccagcgcgggcctgccgggtggcccgagaaaatgttggcagcggctggggctgtattgcggcccctcgtctccgcgcctgggacgcggtggagctgggtggctggctaggcagccagggcggacccccagggatccagcggcctgggggtggggataggagaggggctgggcagcctcgggctccctggcctccgtgactcagccctggcctgtttggcccctcgtgtctctcgcagttctgggaggtgatctctgatgaacatgccatcgactctgctggcacctgccacggggacagggacctgcagctggagcgcatcaacatgtactacaacgaggccagcggtgagacccctgtccttccccagccgccctcctgggaatggcggccctctcctcgctgatgccctcccgcccccgtcaggtggcaggtacgtgccccgccctgtgcttgtggatgtggagccgggcaccatcggctctgtgtgctcagcgccattcgggaggatcttcaggccggacgacttcatcttcggtgagctgcaggtgaggactggggtgaggctccttagccagggccgctcaaattcaaggagtgccccaaagtcatcgctgtgggaactgtggagctagggcccctgaacaccctcccatcctgagtcacgcaatctccttctcctaaacgggctttgggaggaaggcccagctgtctgcctgagaggagctgctgatgcaatctttctgcagggagctgggctgggggcagtggctgctgcttttcttggggatgggcaggagccacctgcagccaggtctgttgtgttaggctgtctcaggttcggctcctgacttaact

SEQ ID NO: 129 - DNA, 1731 bp, synthetic construct
  misc_feature 1..1731: note = Description of Artificial Sequence: Synthetic polynucleotide
  source 1..1731: mol_type = other DNA
agtttaattagatcccatttgtcaactttggcttttgttgcaattgctcttgttgttttagccatgaagtcttttcccatgcctatggaggactggaatttctatcagttttaatcactatgttatcccggaggcctggaatattgcctaaacagactaagcactcagtaaatatttgttgaataaagatcttcatccttagagccctaataagccactgaaagctttaaatgtgaagagtcataatcatatagaagattttaaggtctctctacctgtccatgaaaaagaatgttggggtagagtgggggtgcagtgctatggataagagtggatgcctgggagaaaatgagcttattaccaagaagagctagtgccataaactgaagaaatggggtgtactacccttggtaatgacgcagcctccaaaatgctcccacccccttccccagtgagccacaccacccagtattcacatccttatgtggtcccctcccatgctgaatgggggctgcccctgagggaccaactagatatgacagagccatgctgaatgacttcccagaccagaaggaaaaaggctctgccactccactttggtgttctggatcactcactctcagaaccctgaactgttgcatgagaagtcttgctaccccaagaccatgatgctagaagaatcacatgaggaggccatagggacaagcccgacactacataaagggaaagatgccataccagtccctagctgtacaagtctccatctatttaaatcatcccagctgagaccccaggctctgggaccaaagacatgacttccccattctgccatgtctgaattcccgaccctcaaaaccaaaaaaaaatggtttaagccactatgtttgggggtagtatgccaagcaaccatagataaccagacactcagtgaaggagcctctttggacagtgggatttcaccaaccaggcacaggtttagagtcaaccaactctgaaggacagaatatctcaaagtgccttttgtgttgaagagcctggttagaatgagcaaattgcatcactttaatagaaaaatgcagctgcttccaggtagttcttaatataaactgtcaaaaattcaacggactgatgttctccaaacagatttttattgcacctaagtccttcaggaagacaactatttgtttgattcactaagggagctctggattaccatgatactttcctcttctaaccgtctggagaagtttaatgtaatgtatcctgttagagaacaaattggaatcaccatgatcttctctgaggaatgatgagttaattgcttgctctaaagtttgtcaaataattaattggaactgttatttcaagaatatttgatgcctgaaacttttgtgcttttctatacaaatcaaagactaaattatgatatcagagacttatatttataaaaatggaaatattagccaaatgaagtcctcttttaaatcatgaacagggtatatgcaataaatagcttaaagtaaatgaccaaaaaactagtgaaagtacattgaaatgtgaagacaagaagaggtcagagagttttacaagggaatatcaacctcttacatagaatccaagcatagctagctattctaggagtactaattaagatggcatcttggaaaggctatatatctgctataaatcccaccttcaataagcttctgttagattactactctgccctat

SEQ ID NO: 130 - DNA, 1731 bp, synthetic construct
  misc_feature 1..1731: note = Description of Artificial Sequence: Synthetic polynucleotide
  source 1..1731: mol_type = other DNA
agccaagttaaatgacagcatgacttcaggaggccagatttgagggcttttatctaagatgcagcatcggagtttggtttaagagagtaggaagtgatacatttgttactcaaaggacacttctcttttttgaataaattacctgcagagtttaggccaaagaggtgggcaaggtagatttgggaaactgttgcttgctaatatcaccaaacgctttctttttatacttggtggaggctttaattggggcaaggacatttttatacaaagatagagaaaacaatcacctatggaatttgattccttgctccatgccctcactagcacctctcaacatgcttgatgatatttaaaatttattcatagggaaaaaacttttcatcccacaattagaatcaggcttaacttgctttttgaaaaggtagtatgcaatttgtgttaagatctaaattaccaagatttttatatcttgaaacagatttagatgatagagtgaggtcggtggtggtggttggtgggaaggggtagttttttagagagggtattaagagttgggcttttcaatgtgagagaggtgaaggtttgaaaataagtaagaaaagcactaaaagggtgaagtcaagggcctcagagagccaggatgatagattctatttcacagtttaacacaggatcaccatagaccaaagcaagtttataactaaggcaatgaagatcatctgtctcctcccttccccattaattgtgaactttagttttataagctcctaagaggcagaaaacaaattggagactcgtcatctatttgggagtgtatggcatgtatttattgtcctaggtgctgggtttatttttttcagctaatgacagttttccatgctttatggtaagtgaccataaagtaagtggtaagtgacttacccttcaggcagttcagcccaggacagtcagcagaagactgtttccagatcccacctgctagttacagatcatccctgatagagcagagaggggtgaccaggtagtgactttatagtcactggaggcaaaacccatttttggacagttcattgagggcttacagacaaaaggttcacaaattatgcagtgagctggatggagtgtgaagtgtatttatgggtcgtgcacatacataataggtttactttttgagatttgaaaacatgttttaaccttaacataggattcccacctgatttaaacctcttatttctctaatgtcagacaaaaatgtgagtatgacatacaaagagaaatacatcaaggacttttcatcctcatagtttgccagtgatggtggagagtgtcagaattggggagtagcctaatcaaaccttcttgctctgcatgcagtggcagacagtccctttgctgttcctttggggcatgcagactaataaagtgccaccatcattttatctctcagtgagtagttttaatgctactgcagtggtgggagcactgggtgttgtcgtccacacctgaggacaagcagctttgttttggatcatgtatctgttattgtgatgtagccatttatttttcagggaatgatgccaaatgatgtttgtccctttgctttacatttttatagctaggtctttgaagctgaactggaggaacttcttagccaatactgtcttctcaaaccaaaagttgacagttgcagaagacacattttttagtgtcatggcaaccaagcaacatatt

SEQ ID NO: 131 - DNA, 1730 bp, synthetic construct
  misc_feature 1..1730: note = Description of Artificial Sequence: Synthetic polynucleotide
  source 1..1730: mol_type = other DNA
gctgcacacagagcgcaaaggagaaccagttttgtgttttctgatccttgtttgacaaattacctctctccccacttcattactcccacccacaaagtgcttataaaaaaagattcatgacacaatttcccccttaaaaccatgtcagcccttccccttgataatctaatttgtcctgtcatttggatatcattcaactagactgtcccacctaggtcttctgtaaatagaggtcacatggctggcaccgtgaaaatattctatatgtcagacaaaccaaaggatgagcatagaaagagagaagttgacgtttgtgataagatgacgcaccctagttggcatagtcaattccatcccgccaggtcacgaatacctgagaaacccgaactcaaatctacttggtgcaggattcaaagatggcaggatcagtgcagaatcctgggtctgcctgccctatgagccccatgacttggggctggttttctggtctctctgagcatcaggttcctcacctctaagatgaggatcataatcccatctcttagggttcatgtgaagattgaaataagataatgaaaatgcctcataaaccagaagtgctatccagttcaagaggcatttggagtttgatttggggttttcgtttgaggtttcattgatctgaaaggtgtttattggggtggtctcccactcatcttgattcagggagcttgtggtgctgctctgtctgaaggagcatctttctgtaagcctcacttgtccccctgtcgggtagcagacgacaagctgggcagtcaacaacgcaaaactcccagaccacggcggccttggggcatcctgagcatttcacatccatgacgtagcaatcctggctctggaccaggcgtttcttgtttccacttctcctctggagaggatgagggaggtcctttgtgagaggcatgttctcatgaggaggtcgtcacttgccccaaaagcaggagcatttggttttcagccctcagagggaagtgggcccctaagagatgagagtctctttgaccaattttgtttggaaaccaggtcatcctggtcaaacacctcagagcagatgcagagcccagagcagcctctttggatgaatgaagtaggaaccaaatgaaagaaaagccccaggtaaagcagtgggagtgcagtggcagatcatggaggccactcctctcccaggactccgttccgccaggaccatgcacagcctgtgcttgctgcctgatttgcacacatggttgtgatcttgaatttgtttcctggtgaaaactgtgcttctcaaactctgccatggcctgtctctggatgaggcgaaatggcctttcttaggagtgtttcccagtagtttgctctgcaacagatttctctggaggaggctgttagcactggaactgccttaaagataaagactataatagagtccctctgggatgttttcctggcctgttccctctccccaaacccagggagaaccctgactcagttaggcactcagctcccaaaagaactggtccgtttagtcagttccttctcgggggagtcttagaggctaagcctaggcagccatgttttggcatatgcaaggagaataattaaaaatattactattattacataaaataatagcaatagctaactcttacctagcacttcccatgcgccaggcacttcctgaacactttacatggcgctctgtgtgcagc

SEQ ID NO: 132 - DNA, 1729 bp, synthetic construct
  misc_feature 1..1729: note = Description of Artificial Sequence: Synthetic polynucleotide
  source 1..1729: mol_type = other DNA
ttctcacttccacagaggtttctgttgtttcagagagcactcttctcaatacatctgtgcacaggcgttcccatttcagactccacttctcaggagcccagtctaagacagtaaccaatcttcagacttagagcttcacttatggctgctgagtgctaacatagaactgtttggtgatgcaaactgtgctgtatttgctggagtctgagcagttgattatggggtctttagaggcagtatgaccaagcagttgactaagagtttgggttctagagtgagagagtctgagtttaaatctcagtgtgggacaactcaacttctgtgcctttaaaataatctacttgcctcatgaaattttactgataggaaataacagcaaaaaaggagcaaaacttagccatagtgattttgagtgaataattggaagtggtaacaagtaatgttcctacccagattatatcaagagcaaaataattataggatatttacttatcatttaaaataatttaaatcaatgatacaatcctctaagtgactagtcaataattttatttttaagatattactctgttctgtgtggggctggagatttggcagttacagtggggaataataaaataataaaaaagaaatcaattttcttcatcactcaccccacaaaatatttttgcttacctttgatgggtgggtagatgggtgttttcaaggatggcttaacgtatacattttccaaaaacaattgaaatgaaaacggaaacattgccagtatgagacaccaggttttatgaacattagcatatacttatttgatcaatttttcttaatgtactaagaaattttcatcttttttatccataaataatgcgtatttttgtgtttaaggtctggagatgagaaaacaaaagagtagacagtaagtgacctaaaattttaacctctgatttaaacctctgtatattggcgttatcacaataatttttagtcatgaataatttctagcctgaatcaaaatgaataaatacatattacaaaaaaaaggagaaaaagaaaaaaaggagggaagggaaaacaatatcagtgaatatgacataaacacccatatggtcaaaagattacttcaaatgcatttaggaaaaaaaaagggggggtgttctaatcagctctcctgggtgattgatttttagtcgtttctatgcccttaccacatggtatctggtgcctgatcaattattagtttgaacatggagtacagctttttagagagctatcaacccccttgaagtaaattgtatcctgtggctaaaatttgacatggttcaggaaacacatacattgtatattcttcagcagtgggttgctatttctcagacccctctgaggcatttacatcctcagtgtttgagccaaacttttgagggcttggattctttgaaaacttcaaatgctctgtgctgttatcagaccagtggtgaaactgatctcaaagtccactattaaaactcccctcaaagacattttcattagaactttgtacatgggcagttcaaaagatccagctattggtttttgttcagaagtcttgtctccactttcatattacgcaacttttttgacagactttcaaaacccacaaactgtgggctgcctgcaattccagccaggattttatgctgctcatttgatttcctccggccacatccttctcgtgtccttgtcaacattgcaagga

SEQ ID NO: 133 - DNA, 1728 bp, synthetic construct
  misc_feature 1..1728: note = Description of Artificial Sequence: Synthetic polynucleotide
  source 1..1728: mol_type = other DNA
gtaaagatggagtttggaatggaatctggcctgtctgactctaagccctggatccactgtaatacattataactgctagctttgcaaaatgcctttttccttttctcatctattttcacactcaaactaaaatttagtaaactaaattctgagcagcagaaaaaattttagtaaaggtcctctcatccttgaagaacttcttatataaggatactccttcttgctccctttcccacgcagaactttaccaaaggtcagtaagaatgggctgttgtgttttctctcaaatcctatacagaagtccttaattccgaggtaaacatctgaatggaacaaatgagtatgatctgggggttaaggcaattttcaagtgtgtgtatgtgtgtgtctgttttaaggcataacaaagtccagagattaaggccgagttaaaaaacaaatgaggacaaaccaatgaggacaaaccagtccgctgaggtgcggccagagcagcagcaactgtggctgctttcttgataaaggctgtgaagacggcacgttttactcttattcgtgtatttcttttgacactttacccctctatgaagcctcagaggtgttttaaaattgtgttaggaaacacacagagataagaaaaggcaaatggtcctgatctagtgtctcagggaagaggctggaaaggaaacgcggcgcgagtggggtgggagagggggcctgtggttttgcttctgtccgggctgaagactgagtaaggtagggcccctccttctgcggatgggtttctctctcattccaccctccacccacctccggttccgcgtgcacgcgcgagatagtccagtgggcccacagataacgaccatcagagattaaagaaggaaagtcagcgagcttgaacacaggcgtcccgtgtggaaatgtccaaggagaccgccagaagtgcgcaagccggagtcggctagagtttccttctcaccgagagggggagcccggcgttcccggccgggagcgacccggagtccccagccccgcgtcccagctgccgccagcgccagttttggattcggcggattaggaagaggagggaggggggagagagcgcgaagagggaggggaccgaagctggagggtcccgagtccagcgccgtgttggcgtagagaaactttccctctcggcctcggagacggcgccccggccgtgccggagtggagatcgccaggctcggaggaaccggcagctctccacgcccctgcccgaagcctgacccgactgcctctctcagtgaggtacggagatttatctaggctcttccctggctgcgaacccaggctccctccaggtagcgtggaatcgcttagaagctgatatcccgaggggcggtgggggtggacagctccggccaccagtgcccgggaaggagggcgcggggctgcgcgtagccgctggccagcaggttgtaaaaaattaggacagctaaatgctcagggagtcgtccagcactaaaggaggctaagacctgttgacgcctgctatggcagcgcttgagaaatgactgggggagtccagcgaggtcggggacgcagcggtctccgggctccagaaacctccttagccttttgtggtaactttggtccggcggcggggggccggtgagcaggaactggagggaggcggtggggaaaccgtggatccgtccggctgagggtgcgtggatcagactgggctga

SEQ ID NO: 134 - DNA, 1728 bp, synthetic construct
  misc_feature 1..1728: note = Description of Artificial Sequence: Synthetic polynucleotide
  source 1..1728: mol_type = other DNA
gcccacaatgatgatatgccaaatagagttctcacaacaatggatgctggatggagtcacatcagtgccattgtcaaggaagccctggaaatgtaaaaatcaaaacagtgggtaaactgcaaggccaacgtctgatgatcacattgcaaagagaataacattttaataatattggctgttggttttgacagatcatcagaccttaaaagaaatgcaacaggatgattacagacaaagtcattgtggaagagctatgactagatgtttttaaaatgagccataatccaaaaaaaaaaaaatgctttccaagtggatgctaatcgaaatgccattaatgagcaggggcttttaataatgagaatgattcaacacatgggcttcagtcagtcatctttcccagctttccctgggagtctcatgaaccaatgttatggaggtctctgtggggactcaataatttgagtttcccccaaccgagatttagagtgctactggctcttctgaacacctaatttgccaagaagaatgacccctcctgaacccttcacattgtatcacacatcagggctcagactaacatctgatgtcaggtgattctagtgtcactgggtgcaccagactcagattttggacacaaaatttcctgaagcagccaacagttgtgcctcttttgaatggcagctccttgcttgctgtaggaaactgataggggctgagtatctcagagctagagcaccaggcaggacgctgcgaccttaactaaccattctcactttggtacctacaaacacaatcaataaaactggacaggcccaacagatccaaattattaaatggaactggtacagtcagaattcgccctaacccagttcccacaggatccatgtgcaaatggatgaatgcccataaacaaatagcaagcttcctagaagggaacaaatgacccataggggacaattttgtttttcctttggccacaatgagccaacgattcagagacatgcctatgtcagtatggcatggggccctgatgattgtacaaaatacatgccagtgggtccactgggtgaggccaccatccagccaggggatggcatcttttgactgacactgaacatggccattctgcccaatgggacaaactacttgaaatgatagtagccatgcaggctgcccccaacactttattttgctccatttccactaaatcatgggccattgccaacagcccagctttctggtcaggaaaatagcaactgagtgactgaactattaaaggaactcatgagtggagaaaaggactatggcaatagtttgctttctggacagctaaatatatgtcactctattagaggctggggctaccatggccacccttcagaggaatttatgtcatgtttttggatattccatgagacttcactctgaccaagaaacagcctcactgaccaatcaacataacaatgggcacactctcatggaaaccaatggactttccatgcaattaccaacacccaacactggctgctgtacctggataaacacctcagatatcctagaaatacaagtaggggtgatcataaagcaggctcactggctgcagacaataggacatcaaaagatccccctttcacctcttaacatcttagtcactgcttggggagttttatcctcctaccagtggtactagcttttcatggcccagtgaaatgtactctcactatggct

SEQ ID NO: 135 - DNA, 1727 bp, synthetic construct
  misc_feature 1..1727: note = Description of Artificial Sequence: Synthetic polynucleotide
  source 1..1727: mol_type = other DNA
gttctgcagcattaggcgtgattcctgatcagcttttctcttctttctcttcttgtctgggtatctaatgtaatcaaaaggagcaagaaaaaagaaagaaaacattttctacccccactcgtcaccccactgtggctgcatggtctgactccagaatctttgttttgtaaaagtgaatattagtgaggctcataacaacaaacctaaaaatggaaatcctccaatagtaaaagtagcaacagtcaaatacttctctgtctgtgaagaaagccagcttatgaagaactgaatgtccattacagctcttcgagtagacgcggcccttcaacatatttctcttttattacagatgccagcttcagaaatgaaaatcgctgtgtgagaaaaactgagctagcttctaatgcaatttttattcaggtttgcacatactaaatcactgtttaaggggaaaggtcaaataatagaatgattttatcccataattttttgagaagaatatctttttattagaatgcttacatgtccggtgccaatttcttctagaaatctgttttttaaaagaaatgtgcttcactttgacctaatacataaattgcctattttgtgtgccctggcatgctggtagcagctgtttaaattccctttcttgctttcctttagtcagcagatttacagctctgttctagttatgagggctcttaccgtagctgagggagagtacagttgcccatgaacgcaggtctacaggacagggtgcatgggtgccactccattcaccagagactgttctctcttgttgcttagaaccctgctctgcagctgtcagacctttctacctcctgcagctactgaagagtggatgcatgcacacaatgctgccttcctcctgctggggacactgcacatctgataacagcacattttcatggtagcacacccattcaagcaagaactgattttgtgcagatgggatgatggttatgatagaagctgctaataattttgaacacttacgacttctttacctctggctgtgatcccaggaggtaatcataatcattttactgatagggaactgaagctgaaggggattatgtaacttattggagtttattcaactagtaggtagtacaggtgagactcaaatccagtttctgtttgactctagagctaagatggtacaaatatttgcatcataatttcatctggcaattcctcatatctgaaaactttatactttcctaattctgcttattaaaaatatatagagatatgaatggctttggcaaaatccaaaggagaacaatatacattggtggaaaaacaaacagaaacctttccaagaacgaaattctaataccacatatatttaataactgctttaatgcataaatgagaatgctttataattagcactacatttactgatatatagacaagtgttgctaaaatgcttgaaactatttagtcacagagtttaaaaatgcttcctgactgtctgctttcattattcgttagcattctctttattaatctcgcataagtagttttaatccaaaatttatttgaataatcacaaattccatattaggaattccacatgtggttttgttgccctgatcatgaatggtgctaaatttgactaagggtttcagaaagtgtaatgaagttggggaatgcaatggagacaaatggcatccatgtgcactggtgtcctttcagcg

SEQ ID NO: 136 - DNA, 1724 bp, synthetic construct
  misc_feature 1..1724: note = Description of Artificial Sequence: Synthetic polynucleotide
  source 1..1724: mol_type = other DNA
gctgcacacagagcgccagttactttttatataacatggtttttggtctcttcatcatcatgtccactctccccaaatacatcatctatctctttccctcttaaattgggctacccaaaactaaatgcaaagatgaggtttaaccagcacaggcagcatgcttatccccaattctgttctaacgctatgtttctcttacccaagtgaacatggtatacatttaggtacacctgccagatttcgaaggtggaagtgagtttccctgaattctgccactgccaccaacaagtacagctgtgaatactttgggatttttctgcagcagcacttggtattgcctaatcactagctttgtgggtgattaaagacagttgcaaagacatcagaagtagcttttgggttcctactgtgaagttggtaattccagtagtagcttactgattcctcttcttcctgactgtggcagaagtagaaactttcctggcagactaaatccatggtgttcctctaagattcattcctggaggccccacctagagtctgctcctccagcacatccgacaatgttgtaagtgcagatggtccccaacttaagatggttcaacgtcaggatcgtgcgaaagtgatacacgttcagtatcctcctctacttacgatgggtttatcataagttgagaagcatctgtacttaattccttgtattgaatcccttgctgcttaaaatggatagagtactctctgtttcctgcaactgtatggtgaacattttgaacaatgagtaggatttcacaagacagaaaagattatagcaattaaaagatattgctttatattcacaaatatgtaatatccatggggctggagaatggatggacagatgtattaaatttgtggatggatggatgggcatgggaaacactgccttcctgtctctatatgcttatcccataaagtcacaggttggcaatactggctggcatctatattactgatcaaaatatgtagtttggctacagtgataaatattcccatattgatcaggactctgggttaccaggcacaaaaacacaccttaaaatgattcaggcaaaagagagggattagtaatagcccaacaactgaaaaggcaggtgtggatatgactttaggaaccactaagccaaggatcaaaggctctaaggaatctctctcttcatctgtcatctctacttctctccaaatactagatatcgtctcccaaaccatcttacctaacagaatggggcatgactgtcagctactccagatttagatcccaaatgctccagaaccagagatgaaaataaaggctgtcttctcccaactgaaatttgaaaaacccaagagaaaaactcagatcaccctggtttggaccctatgctcatccttggtccattgctgtggcctggaagtgaggcactaagattggcccagcctggaccacataatcattcctgtagccaggggagccacatcaattggcagaagaataggcatggggcagacatagcaatgctcgccccctaggcctgacatgatctgaatgactcaccaattgcagctgttactcttttagatgttaactcttctcagaggatttaaaaccgctgacaatactggtacactgagaagctggtttcagtgttactactttgacgcacatgtttcttaaatatttcatccatggagggcgctctgtgtgcagc

SEQ ID NO: 137 - DNA, 1722 bp, synthetic construct
  misc_feature 1..1722: note = Description of Artificial Sequence: Synthetic polynucleotide
  source 1..1722: mol_type = other DNA
taaacttaaagaataaagctttccattttgaaaagatcttattttgcatatttaatgaaagtcttgattatttgttatatactgtcatcagtttgtattcaagtaaaggtaattaatcatacttcttaactaaaaaattattaacaactgttatgcatggtatacctgaccatatctctcataaataaatatacaggtaggataatgaggttcaaaatatagtgtaacatacaatttggcttcatagaacataaaacataccattggatgttgatgggtatgtttctatatgcatcaattttcattctagagaaaagatcataggcttactctttagatatacctgaagttgcatataagaataatcaagtgaatttgcgatgtgaatttagataatttatacaggctattaaaggctgttgtgttctatctgtaaaggtataaaatgcaatacatcttaattcattattgtaaagactaaataactaattctcattcctcacttctcttttttatttatgccttctattcatctttcagcatgttctcctcctcttcactgctctttcacattcccattaactattgcatattattctccatatttttgtagcagaacctaaaatatctttaaccaaaaaataatcttatttcccttttattgttgagcactccgcttaactacaattctgagcctccctttgcattatgtgcaggcttttaactgagttggggtcaatgaacagtgtctaggagtaaaaaatggtacttcctgatctgtctcatataaggcttgatgtcattcatcttgtctttccccactcactaaatgtagaagactcagggacatggaaaagggtaaagccactgtcataaggtaaaagtcacctgagtccctaaacatcttgtgaatattggcatttaattgttatgtaactaaacaaagttttttttgtataaagctactgagattgagatattttataggagtttatgtcactttaattcatgtagaattggtatcttgaagtgaatgttgtgaaaatataagcatagacttagctgtgaggtgactggtggaagaataaactactatgggaagcagaaaatctgcagagccatacaacgttgtgataaaacatttgacagaaatgtcacctgaattatatggacaccatgtgcctgtagctctagaagaggttggaaaacaagatatgagtttttagtggtgatttttaaaactggccttccttagtatgctatatatgcttcgcatgtatgctatgcctacagaaggaagagataatctccagcaaagagtgaacaatgtgcaaataaaaaaaaatgaaatgacagagagagtccagaaatctgaaatattggattatggaaacaccaacagttttagaccttaaagagtatgactaagaaaggttttaaataatgcaatcacatcaagactcagcaaaattgaatagcaacttcactagtgggaaacaggaatgaaaggaagaaggaagagatgatgacaaaagtagaaaacaaataacaaaatggcagaagtaagtcattactgatcaataataacattgaatataaatgtgctaaactcttcaatcaaaaaacatacactggctgaatgaatgggaaaataagactcattgatctgttgcctacaagaaacacatgtcacctataaagacacacatagactgaaaggaa

SEQ ID NO: 138 - DNA, 1719 bp, synthetic construct
  misc_feature 1..1719: note = Description of Artificial Sequence: Synthetic polynucleotide
  source 1..1719: mol_type = other DNA
acccattatcccactccagagagtatattctcacagaccattgtttaaaagcaaaatacctgatttcccatacctcaaagtaagcttattgcccatcctatgcatacctccacatataaactcaaagaaactatgtgaattagaatagaacacattgcagtccacacaatgtttaaataaatggcatcatacccaatttttccccatatgggtacgagagacataagctgaattatgaacagacagtcacggagcaatgctcaaagtcattaaataattatattttgccattttcccgctttaatgctttctctgctatatctattaatttttcagaccttggggcagggacaaagtgagaaaggaatatcagtggggtagatccagagttcatttctttgcttactttattctttttcctaatccagatacttaaagagccttagcttattagaagaaaacaaacgctaatcttgaatacttcatttctttgacctaatgagtggcagattcataaaggcgttatcacaatttggcattattatagccaattaaagtgtatgctcttgcaaatatcatggttttggtttttgctttcttatatttaccggtgccagcatttctcaattgggataagccaacaaatcaattattcaaaaggtatgaaaaagggttcattgtttcatatctagtggctgagtttaagatttggtaaatactgagccagaattttagtgtgtggttttattacatgacaatactcatttttaagttgagatctctttagcttgaccctaagtgtttttatgttttatatactttcctgaacagtttttcttctcaccctgtacaccctggtttatacctgctttcaccttcctggactgactattgaatctcaagcttacttttttgtaagattcaatagtgagcatttacttttttccttttacaacttctaaccatttgaacatcttttctgtcagtcctcctagtacaggagtctaagggctcagctattcctttgtccaattctgacaccctgtatgtagacatatgatttagatgcagccatttcatggtttcagctaggactttgaaacttggactgatgcaaatttgaagggaaatggtgaaattaatcactgtggttatatttttgagagtccagttctgatggtagaatcctagccagaatgttcctgggacattgacttgattatttttctgcccaaattctgaccctggcttcctactcttgccacagatctgtaagccctctgatgtcattccaaaaaattcatgatttctcttgaatgcagctaaatactctaacagtgccacaattatgtaatttactgcaatgatactataaaactgcatgtatcctcatccatatgttgtaattagttcatcaaccatttatacattggtagagtgatttagtttttactgtgcattctattgctaagctcaataagttcgttaattcttttaaaaatctcccaattatattctttagaaattggctatttaattttctaaattgaaagcatgtatttgtaactgcgctctgtgtgcagcagaaaggaattgaatgtattcgagacgaatagaacagaaatgaatggaaaggcatcaaatggaatggacacgaagggacgggacttgaatggactcaagggttatgggagcgtgggggggggagtcgtagggggt

SEQ ID NO: 139 - DNA, 1719 bp, synthetic construct
  misc_feature 1..1719: note = Description of Artificial Sequence: Synthetic polynucleotide
  source 1..1719: mol_type = other DNA
gagtctcttcatttattgtactggggtgggaggaagcctgcatacaagcacagacatatggtttttatttaatgagctaatgaaaagaatgcatttcaagacatagcacatattacggtgactcaaattgcttatgctatttcatgtttttataagttaccatctaatttgtcattacaattcaaagtaacttcattttcccctgtggagtactgaaaattactgtaacttataattttatggtaattatagtgagaactcccataattagtgtagcaagttcaccgttctatttatttttccaaatgagtcacacccctggtaggggaaacttgctgtgtaggtttaaagctccaggtgctatctataggtgcatggtatctcatcatcataacctttcttcctatttcccctctgaaatattctccccgaccaacttgaggaaagatctaagtttaaaatagaataatactgaaaatttagtctgcttagaacatatgccatatttacatggaacgaaaagaagcttacggcacccaaggcccttgcatttatttgttctcaagtttttgtgtgtaatatatacttactcaataaactgcttccattcagagcacaagaattatccggtcgtctaccttccatccaaatgtgtggctgtagtatccaccaaagctcctcagtcatgaaataggacctctatcctcccgcttacagttttaataacagctgtggattggactttattagtgcttctagtcctctccagccccgtgttgatgccttggttcaggtgctcattatttctgctttattcaaagtctccttgaaaacaggaggacctgcagagataatcacttcattcttcgtgccccagacatacctgtacatagctttagaataacaacacctgagaacacgttggcaacaatatagagcaacagggactttcctactctgcgagtgtggacctgaattatgactggcattttggagagaagtttggcaaaactgagaaaaaaggaagatgattatatcccacagccaggatagtcaaggttttagttatattattaggagtaatactcagaaataaaaaagtgaattgcacaagaaaagatgcatacaaaagtttgttgcaatgttgtttataatatcaaaaaaataaaaataaaaaacaatccagggtccttcaacaggagaatgcataaataaattggcattttatacaaagtaattgtgaacacatgctacaagatgtaaattataaattactgtgtcaatgttggtaatctcagacacaaagtatggaacaaggaaaagtgagctgcagagaataataaaattcaaatacttctaaaataagtaatattttgaataaagtatcccaaacatttactgagcagttactatgttcctggcattgtttcaagtactttgctcttggaaaggaaaaatgtgaaattcgtgaggatatttgcttatggtgagggagtttatggtgaagaggctaggaaaatggttttgggaaggggccttagctttacttgtagtgcttattttctttctaaaggtatatctgcctgctgggcatggtggctcacacctgtaatcccaccactttgggaggccaaggtgaatggatcacctgaggtcaagagttccagaccagactgaccaacaaggtgaaactctatctctactaaaaatacaaaagtt

SEQ ID NO: 140 - DNA, 1719 bp, synthetic construct
  misc_feature 1..1719: note = Description of Artificial Sequence: Synthetic polynucleotide
  source 1..1719: mol_type = other DNA
gtggcacgtgtcggtcagtcctcaggcccgccctgcccactggccccccgccggccacccgcctggccggccacctgtggtccccttcaggcagaagcagaggtaggcgttgtcgcggtcctggcaggtgcccccgtggcggcagggctggctggagcactcgttgatgttggtctcgcagtggtggcccgtgtagcctgggcggcagaggcaggtgaaggtggcgacgccgtccttgcaggagccgtagtggcaggggtcggggtcgcactcatcgatgtccacctcgcagtgcgtccccgtgtaccctggaccgcgggaggggcgggcacaggaagacttaggactggcggcccccgggacacccatgaccagacctggggtcacctgtgccaacctgaggagggctccgagcgtggcattcccacctactcaggattgctgtgctctcggcctctggaccaggtggcccagaccaaggtgtccatgaccttgtcagtttcactgccctgagtgccctgtcccgtccccagtccctccccgctggtgggcgccggcccgcaccttccgtgcacacacaggtgtaagtgttgggtccgtccaggcacttggcaccattcttgcagggggtgctggcacactcgtccacatcgtactggcacagatgcccagtgaagcctggggccggggaggggaggggagggagtcatgtgcaacagcgctatggcccttcagggacccctggccagaccccagcagtgagcgcctggctgggctccccagggcacactcagcctgagctcagccagccccagctctccctgcctcccgctgcccgctccccggatcaaagcccctcccccagcaccacacgccctcgctcccacagaaggggcctttttcccaaaccgactgggttgctatggctacagtggagccgggctgagaatggggctcccctcgctccagtgtctgggacgggtaatctatgtcttgggagcctaggcttgggctggcaacgcctccctgggctctgcgccccggcccccagctctgggacagatggaaacacctttcacccaggcccctgagagttcctccaagtccgccccgggcagccatcatctccattgcaggccaacctgccccacgtggttctctgcatacccttgtcgctggcgtgccgttgggcaggggacatggcaggacagggcaggctggcctccctcccagcctcgagccctcagaaagccaggctggagcctcctccctgtctgggcactgcagctcctggtatacccttctctccaggcagaaggggctgcacccagatcaaggaggatctcctggccctgggctccaccgcgacccctgggcaagctcccactccccactgggccctgcccttccttcggggaagtctgaaaacactcccatccactcatgaggcaaaaccctcgctctcctgggaatctgaacacaaccaatggccaggcccccctcaggaggccggggtgcagacggcccaggggcaggggacacaacctacggccaggcacccctcaggaggccggggtgcagacggcccaggggcaggggacacaatccacagccaggcccccctcaggaggccggggtgcagacggcccaggagcaggggacacaacccacggccctcacccctcaggaggccggggtgcggacggcccgagggcaggg

SEQ ID NO: 141 - DNA, 1716 bp, synthetic construct
  misc_feature 1..1716: note = Description of Artificial Sequence: Synthetic polynucleotide
  source 1..1716: mol_type = other DNA
aaaaaaaaatcaactattttcctttggtccaaaagttttgccagaatttgtattattgctgctacaaaattgattcaaacatataatcattttgacacttcgttactaattaatttggtattttttcaatgatgaaaatcttagtaagtttactaacttttcacataaatggcctagaaatagtacaatctgaaataacattccttttctttctctgcaggttttatgcccaggtctatcaaatatcatgtgtgagtcaccgttccctctggtgccatacttgatattgttttgttctcctaacaatttcaaagtataagcaagaggtatcagcctcttgtcacataggccaaagtacaaacagtacttagcttctctaagcagtatgtatgataatttatacaatatccctggtacgtttcagtcaatattctgttattagtgtttactatatacttttctaaatattttctagtgccttcaacttgtctttgttccaaaccccagtaggatcaggcaacaagtcaattttctgcatatttgatgaatacattttaaacaattatagaaagtgaaacatatttcataccattcaacctgacattcttcctatatcagtttgattatatggatgcaaccactctctctcccttcttttgtttttctcttaatgaaaactagaatcaaacatggtgcagattttctagaatgtctaatgcaggaacgtacagaattctgagatgagaggtgtattcctttccaaatcaatgagcaaaactaaagagagtatgcctgcatcatttctcacaggacacaataggggctgatactaactggaaatctggtaacaggtttttggtgttcacattttagtgttcattataaagcaactgctgacacaaatcaagtccacttactgcttggtcaataggtcatcaggaaaaaatcagctctgaagctctgttggctgattgaacttctgtaggtcctgctaccaatcccgaaagtaaccattggtgatcacttaaagttcggggaagatgaattttgaaattggtcctattcaagtgcagaagaaccaaagaaagagctaaacagaagaaacctgtgaacctgtgtgaaattgaaaatccctggatgggaactgcacagtgctaatcgttatcttcggccaatcaattgactctgtgtttactagctatttgtcttatttctgaattcagtatatcttcagcgttccccatttgtcatataattgttattgttagttttggacaaatagtatttgctatttttgaggatgcagcaaaattctgatctttcaaatctggagtagaggcaaagttagagactgcacaaggccctagacaccattttggtaacatttgcttttgttcttgactcaagctatcttcaagaaggcatttacttctcagaactcatgtactgacatggagtattgcaataactccaacaatcaataagcctgcttctaaggtgggctgagtgcttaagcacttcacagtgatggggttaacctacccctccaagtgcattttaagactaagttttcatgaaaatattcattttcaaaaagacacttataatccaaccaaacatgatgagattttttccattaaacagacataaaaatatatatctgaaataatccactttatataatgaattgtacaaaattgttttaacacaattttt

SEQ ID NO: 142 - DNA, 1714 bp, synthetic construct
  misc_feature 1..1714: note = Description of Artificial Sequence: Synthetic polynucleotide
  source 1..1714: mol_type = other DNA
gctgcacacagagcgctttaaaccaccatatctgagaacatgatgtcaagttccttttagtccctgcaatgttttacctatagagagagctctcaataaatactgaccaattgtaagtttgaggatctgtttcagagtggggtaggggaatgagagagtctagccttagttttaaaaacatttttcagtacctacttgacctggctgtcacctgccatttctgtatgcctttgaaattcaggtgaactgggttggagtcagcagattttacatcctggttaataccactttctacctcaagttttcttatcctgccaccacacaggttctgtttctgagctgtcctgatgtaaaatttaccctctgcaagtgtccgcaagacacctaacctcacagtatgatgtttttctagtacttctcttgaagatgttgggattacattgcatggcttacgatattttgttgatactttccccttctactgctccttatccccacacacctaaaaccacacacacgctctgagtcttctaaaagtctaagcttcagcccccactgggataccctcttcttgcagcttccccatgaagcatcatccgttcttctctaattttcttccattggaaatgtggtgaataaaattctctacatttttttacactaataggtgctttgtgattttatgtacagtttcacgtaatgcttgcaattagatgttagtgttctcattttatgatgagagagagagagagacaagaaaaaaaaatagtcttgagtagttaggacttatccgaggccagttgtcactgaaggtactgtgttgggaagcttagctccctgcctggactctgatgatttttctattctatcctgcctccccagtccaactgaggcatgcagcagagaggaagaaaggggattctgtcttaggtagccagctctggcagtgtttctcaatggaatgctgttgacaatttgagtaggatgatttgctgcaaggaactgttctgggcattgcaggtgcctggaatccctggctcctatccactaagtgctggtagtgtcttccactcactgtggcaaccaatgaagtaacctcatgcatgtctaaagctttaaagtatgtggagaagtatagattatccctgagataggtggactaagtctttatttcgatactggggtcctcatttccatattcatagattaactggaaggaagtatgaatatagcagccactactaatgttaaaatggcaacatgaaacaaaatggtgagggaagaggagagtggcagtaggaaaactacagtctttctctccccgtacttgacacgtgggtcccatggaaggctcagattgcagtgtccttctcacccctggaattaggctgtgggtagaagccaagatagaatggaaaacaaggccaggaaggaagtggtgtcttgggaagcagcaggaaagagggaaccagcatttgttggtggggagatgactgggcaagcaggaaggacatctagatagagtctttgcttggttgcaagcaattgtgtaatcttgagcagtatcctcttgacatgcagaatgagagacttggatcaggggatggccaagagtcttggccctgtttctcagttcagggactttgaggatcagaagtactggttattttgtttactgatatttcttaatactttggttgttgtgtacagttta

SEQ ID NO: 143 - DNA, 1714 bp, synthetic construct
  misc_feature 1..1714: note = Description of Artificial Sequence: Synthetic polynucleotide
  source 1..1714: mol_type = other DNA
ggtgtgaaccaccgctcccagccaaaactcacttttaaagaatagcgtcttaagcttcagggcttaaagcccaaaactttattggggagtgcaatcccagggtagaaggagtcagcccaaaaggagggagagcaaatataaggaaatgtgttgctaacttttcacaacttcagtggtgatgatatctcagtttctcgggttgtcttcagagaggccacgttgccaagagggaaaaggatgaaagaattgatctgttgacatctgtcttccattgttaaaagtttgcccagcattttgaggctaagtgctaagtgggttctgaggcatcttgcacctcaacagcaatgtgggagccccagaacggtggagggagaggtaacagggcacaggaatgaagaaagatgctctttggccatgcccgcttgtgacacggggaccagtattagctgccacagtggtgctaggtctgtagaggcagtcataccttgcaacagagacttccaggaccacgagaacttcaagtcatacctagggctgcctcagccaagaaataaggcaatgcagtgaatccagggccaatagcaagtctgcagggattggggttttcaatgaaagcttctgtaatggtacattaaaattaaattttgctgaggcatatactaaatggtgagatgtgagaccactccaatgcaggatataaactcaggtcccttgtccttccaagccttgccttttccatagttccccactggttgttatagagtgcaatactggcttcaacagtcaccatcatggcagaagaaggtgggtcatctacaagccacacttcaagtttccagtggattgggcatggaagtttaattgcatttactgcagaagcaagtgatgatgataagtttgtggtaaatgtggaccgggtgggggtcacagggtggggttgggtatgaaaagatcatggctgtattgcattcctgtccttcttttttatccactgctcatgagtgccaggcataataggattaagtagcatcttagaggtacccttggatattggggcatagctctttgcttctgtgtgtgctagaaccctcttgggagctaggtctcctgtgcctaccttctccctcttcactacaaggctacacattcgttttcagttccaacagtccaaaaccacctgctcttcacttttcccaggtttccgaggcaaaaagcaagcagctttttgaggggaatgaggtgggaatcgagggttcccccatcagcgccctgggagacattaaaggggaaatttagcctaagtaatggttgaaacctgtagctcagagaactacaaaactacagcctgggacactttgaacatctgctctagaaagattttgtggattttttagattcactttgggttttcatgggaaaactcagggaatggaagatgttaatttcttatctgggtcacttaacatctcattgcctcttcgtgtttttaactttcccaaagtgttggtttgaagttccttaaacattgatgccttgctctgctgttttggggaacttacactgtttatgaagtcatatgactgattctatttatgtttgaagtatctggttaagcagttttccctgaatctccaagcagttatcagatttggtagctgaagatcttagctttataggatatgaataactctactgtaggggatgaatagggata

SEQ ID NO: 144 - DNA, 1709 bp, synthetic construct
  misc_feature 1..1709: note = Description of Artificial Sequence: Synthetic polynucleotide
  source 1..1709: mol_type = other DNA
gggctttctgtggcattgagtcttgcaaaattgtcttctagcctggagtgtgatgtgcttctactagctacattatttgtttttctatggctgtttcctttcccttggtaggatgtgtgtgattctaaaaatgccttttactgcctgttttgcctgaaggtcaccacctgggaggttttccccacttttgcaggaactgtggcaagaagaatattatgtttctattatggtacttatcatgatactgtttatcatgcttttatagttttatagtggagcacttttgcgataatgtagggcatgttgctcataactgttttactgaactgctgaaccaagagagtgaagacaggcagacagaagcaagtcactatgctatgaggccaccttgggcaaacatcttcaatagctttataatcatgtgttacttcatggctacctgttttctatatgggaagaagttcttcacatgagagtttattttgctagtgatagataaagtttctactctcttcagggacattccttaaagttgactttactgtaacaacagacatttcttcagttttcagttttattgctatttctgctagaacacctcatccaccagcttggccccataaatgatggtggtctgtcaaagcatgccctaccaggcaagtgaagactgccattcagactttgcctccagcaattacctaggattccctggaatgagaggactcagtgtcattccctcctccagaaaacagccagtcctgagcgtgcagggttgccagcctcaatttcatcacttgcttttctacttttaaatgtttgcaaacaacagcagtccatgtcacatgttttattctttttagattaatgaggtggcctgttcaagttggacgggccgcattaatctcagtgaatgcagtccttagcaccacaaaaacaaacagatgattttaactcaactggacaaagagtcttggcatagtaggtgcataattgttgctttttggcatttgactggacagcgagagttgtgattttgattctccaaaagcagactatgtgagcaccaagtatattttaggtcatttagatagtttgttgtttgaatgaatgaggataagacatccatcaatttttgatactgcaccaaatctgccttatttcaaaaggaactaactaaacactccatcacagatgccctgacaaagatgcatggatgactatattaacgagactgtgtcagaatgaataataatcaatggctgtcctgagaatccaacataaatttccttatctaaaatagtggtttgtttaaatgatgaagcaaaggtggcattggagctgttggctcactgtcccttttattctgttaactgcagaagcactgaatctgacgccctaccttgtggggtaatggtgtgcttatctccccctcctcaaacagagtttggaacgttgctagtaacagctagcctactgctaaaataccatcaatgacaggacagaagaaatggatatttaggaaaacataaaactgaggaagtaggccaaaaaaagtactgatcgaaagcaaataaaggaaagatctataatattgggacaggcagcatctccctgcttgcatggtaattttctttagccggtaaccaatgagaacgcctgccatgggaagaaggtgtgattttgtgatttaatgatccaaggcccatttt

SEQ ID NO: 145 - DNA, 1708 bp, synthetic construct
  misc_feature 1..1708: note = Description of Artificial Sequence: Synthetic polynucleotide
  source 1..1708: mol_type = other DNA
gcgctctgtgtgcagctacttcctcagccacgctgacctttgtcttcctccaacacagcaaacatgttcccataatcagcactgttcatttgctgttccttgtactgcagagtctgtcaccggatgtctgcacagtgatccctcattcagctcttatcttgactgttacttccttagaggtgacacctggccaccacagctaaggcagttcctccccacccctacccattcaccttcagtcatgccgccctgtgttatatgcttcatagcaatggtcatctcaccatgggatgctctctcattgaaacgcgtttattattatctctatcctccactaacagtaagctcaaaggaagtagagacctcaatgattttattcataattgtatgcccagcatcaggaatagcatctgattcctagtaggcactaattacagaattgctgaattaatggattgtattttctgaatccattcaactttaacattagcaaatttttaatttttcttagcacagataaatgtagaagtaaagtttagattaacctctgtctaaactgttacaaattacaaattaagtaaagtgaactcagcttctttgtctctcagaataatttgactatgagcaaggaaaaattatcacccctggaaaagtaattttttttcttatctgttttagtgacattcatagcttcagagtcaaaacacatgacatcacccataaagtatgcttcttcagagcacataaaagctactattcttttggaaactgtccatactatactctagaattacaacccttaatgagtttttcaatagtttcatttctttctcctcatctgttcagtttaataaagcttacaactctgtcacaaaattagctttttcttaaactttgacaaacaaaatgcaaaactctctgaaaggtttctctatgatttagtggaagagtagtgttgcctattaccactggggccacagtaattcaaatgatcttactgctatacatgctcacacaaacatgcatgcatataacaccagaacaaataatttaatcatgggtaacattattttctagtttttttaggagaaaatattcataattagggtattttatcagaaaagtatgagatttaaaggataaacataatatcaaacttgttctttcaaaaaatgtgatattatgtttcccctcctaaaatgacttttagatttttatgggaacatttgctggtagaccaatcatcaaagcaaaaaataatttaaacgcaatcactattatcatgaatgtaattgttaagtgaaagaaaccaaattcttattctgttatacatctacaaggaaaaaacaaagaaggtaactatctttaaacgaatgttcctttcagcattgcttagaaaagtgaaaaactgtaagtaactacaatctagcaatagtgaaatggatcaataaactgtgtgggataatgagccacagttaaaataactggactagatagattagatatacagataaagagctcaatctgaatccgcctttgcaaaattgtaacggagaacattataacagtgaaagaaatcagacctaattgactctaccttgcttctaacccttaagctgtccttattcattcctgggcatagacggaactaagtttgggaaggaattcagttcatggtttgactctgaaaaagcgctctgtgtgcagc

SEQ ID NO: 146 - DNA, 1707 bp, synthetic construct
  misc_feature 1..1707: note = Description of Artificial Sequence: Synthetic polynucleotide
  source 1..1707: mol_type = other DNA
cacattgtgcacatgtaccctaaaacttaaagtataataaaaaaaagaaaaaagagacccaattgttgacaaagttatgaaaaagatagtttttaaggagtctttaagtaatattgtattttctgcaaacagacaatttgatttcccctattccaaatttcaggacatttcttcttttttcttgtcaaattgttctggctagaattacagtaccatgtagaagtggtggaaaagagcatttttgtcttgttcaacatcttagagaaaaggctttcagtttttccagccttggtataatgcaagctgtgggtttcacatatctggactttattattttgagatatgtttcttgtataccaagtttgttgagaatttctataaggaatggaggttgaatttttttctatgactttcttaaagcaattaatcataaaataataataagcaggtcaatacaagatccataaattagtggaagctagttatttgcactgctgccatagagtaggatcactacacaactcatggtgttgatgggaaactataattctgcaataattaaagactagtgatttacactgggctctattgagagatttggttgtcaactacagaaatcgagatgaaggggcactgagaaacatttcgcttcatatcatctcaacttctaatatcaatttttagtactaatacagtcctattttctcagtatactgtctcacaggttatagtatatgtcttagaaaattaagggttgtttcattctaataattaactcagaaaaattcatttcctattatggatgacaagtgtaaattcatatcttaataattacccacactccaaaacactactacagccaaaggcaagagaaaggcagttatagatgagattctctgaggtcagttatgtaaatacccaaggactattgtctatgaccttgaatgtcactttcttcccttccatgagctacatccaggatattctgtgaatctgagagcgttgagcatgtttaattattttatctcactgccccttagtcttgctttctccagttgacaaccaaatctctcaacaataggcccagcgtaaatcaccagacttcaattattgtagaactatggtttcccaacaacattatgagttacaaaatgatactactttatggcagcagtgaaaatgatgaacttccactaacttatgaatctctgaatggctagcatggaggtgtgtatgtatcagcgcactgttctagaaatgttccgtttctgtccattattttatgtagtaatgaggacaacgtgaactaaagggagtatccatggccttataagcacagagaccacatccagtgcaggtgcagagcaaggctgcaacagtcagcaagttgctctctgaagagtcttccaattcccttgcccaaagcatctgctcattcatgggctgagaaaagggaagtcatgcatgcagtctactctctctacagagctgacaggggacacggacaacatcgattattcatggaattttcccataggaatgcagctgtgtgcacacacacataatacatttttaaatgttttttttatttatcctctccaattttaaaaaagtcatcaccttttctcctaatcaaagaggattttgaccagaatgcttggtgggagccccctgctctcccagatgcccaagcgctctgtgtgcagc

SEQ ID NO: 147 - DNA, 1701 bp, synthetic construct
  misc_feature 1..1701: note = Description of Artificial Sequence: Synthetic polynucleotide
  source 1..1701: mol_type = other DNA
acatttttctacttttctatattttctacacatctatatatgatttgtgtttgtgtgtttgtgtgtgtgtatgcatgcatgtaaataaaatatacctctaagtctttgtaaccttaagacggtggggcaaaatatttttattttctgttgttgattatttaaaatttagctatattaaatgttttctgatttagtaaacatacataaggcctatttatagttgaatggcagtcttacaaaacctaagcaaccttggtttactctatctgtgggaaaagcatttttagtagaatgcttgtgcatcttcctacattcctgtaatcaaacagtatttatcatcaactatgttggtgactctcactttgacatacgctgaaccagaaatcctaggaaaaactgatgacagaaagctaaggggaaggataggaagccgggaaaccctgggaaaggagggattatattacacatgttatgggaactagtttgtatgtgcggggcacagagcatacacttagataagaagggggtcataaaaccagaaaggcaataaatagaatgttatgagcatgaactctagatgcaaactgttcaggttcaattccacctctgcttcttactacatttattaccttaagcaagtcacttaacttctccctgccgtttctgccacatctgtataatggggataacagaccctaccttagagggttgtcacactaatgaattctgagaatagtccctggtactacagttaagtgctcattagttgtccacactcatcatcgtcattactcccattactatgaagtgaagagttgtgctgctaggacgggagcagcaacttttcaacaccaatcgcttttttagatggcctcctttctagccttgttagttgcccaaattctgaaaaaaacaagaactaagactctagaaggagttctgagaggcagacgtgtgtctctgtgtgtgtttgtgtgtgtgtgtaggtgcgtgggcatgtagacgaaggaggaatcaggagtaatgccaagaatgagaatcaaatctgtataagcagttcagaaaaggagcatcatgagtcgctcttctcagtgctgccccaagggttccacagtttgctccttccatcattcacttggataacacctttcaatgtctctccatggccttcagagttaaatcaaaactattccttggaatgacttaaaacccatactacctctaaagcctcatctcttgactctctcgcaccaagctcactgagcttccagccctatcaaatttcttaattaacaaactctcacatctcagaggctttgcacatgttgctccctctgcctgaaaagtaacctctacctcctccaatagcaaactgctactcaaacttcaaaacacagctcaaggataactccagagctctttcctgatttcaagcttaatgcctctgctgtattatcccctatgtgcataacagcaccactaccaccaccaccaccaccaccctcaccaccaccaccaccaccactaccaccaccaccaccatcaccactaaaaccacgaccaccaccaacaccatcaccactaccaccaccaccaccaccaccctcaccaccaccaccaccaccactaccaccaccaccaccatcaccactaaaaccacgaccaccaccaacaccatcaccactaccaccaccaccacca

SEQ ID NO: 148 - DNA, 1696 bp, synthetic construct
  misc_feature 1..1696: note = Description of Artificial Sequence: Synthetic polynucleotide
  source 1..1696: mol_type = other DNA
gcctgataatgtttaatttataaattaggcattgtaagagattaacaactactaacaaaatagaacaattataacaatatgcctgcaccgtaactcttgcactttggtgccattattaagtaaaataagggtgacacttaaacacaggcactgtgatcctgttacaatcgatctgataactgagatagctactatttgtgatggtacaagatttcatcaggctgctcagaatgacctgcaactcaaaatgtatgaattgcttatttcaggaattctccatttcacattttttttttttttaccacagttggttgtgggttagtgtaactgctaaaagcaaaacatcagataaggcgagactgctgtaagactcttcctaagtctgaattggtctagggactgaagcaagttggaagttgcagctcaaaggagctacaatccagtgagaagaaaagacccatactgatgaatcacagcaaaaaaagtggcaaggcacatacctaacattagggtaaacagaggtggaggaagtggtggggtgtttagaatacatggggaagatggtgcaggctatggggaagaatagtagggatgaggcagtcattttaatttgggagaagtggagtttgaaagaggagtttttatttaagtatagattctatgagcatacatgaaagaatctggattcgagaaggaagtggtaatactgccattgaaggattgttaccttggcactgatgcgtagggactctaggatctgggacgggatggaaccaaagacaagagattttgggaatgaggtcaggaaaacatctacatcagggtgcttgttaaaaatgtggatttctgggcttcaccctatatctaataagctagtatctgtttcagtgttttgctatgaagtcagcaattttaccgtgagccccaggtgattcttaacacatgattgttcccagctctgcctgttagaatcaccaagggagcttcgaaaaaatcctgatgcgtggctttaccactaggagcaattaaatcaacacctctggagatgaattctgggcttcagtgtttgtttgttttttaatgttccctggcgattggaacattcagttgaggttgaaatctactgagccagaagtttctcacagtgagccaggcatggggtcttgatcatgtgcctggagttatggtcatagaaatggagaagagatgtgcataaaaaatatttggaaaaaaatgtccaaagcaattccatctttagttcataaaatattattaattgatatatcatttagaaacaaaaactctttttttaaaaaaaacacttcagtgttggattttaaaaataaaatggcttaccttggcatgagcaaagtatcaactagcattctttaaatattaataaatagaatgtggttgcatgtatttttgtccctaattatcttttgcttttatttcatgtgaatttcagcacctgagctgcagtgtaactttgaaactggaatctgtaactgggaacaagatgcaaaagatgactttgattggaccaggaaccagggtccaactccaacacttaacacagggccaatgaaagataacactctgggcacagctaaaggacactatctctacatagaatcttcagagccacaggcttttcaagacagtgctgccttactcagcccaatccttaatgcca

SEQ ID NO: 149 - DNA, 1692 bp, synthetic construct
  misc_feature 1..1692: note = Description of Artificial Sequence: Synthetic polynucleotide
  source 1..1692: mol_type = other DNA
cggcctccctctgatcagccccttctttctgatcagatgcattattgacgaggcagcctcctccacctgcctctcatcagagcagctcgtttcccaccgtggtaatttatacttgtgattttggccttgatcaataaaggcaacggagaagacgcacccgttcatttcctacaggaggggcggaaacacacaggcctctgtgcagagctttcctgggctcttctgaaggcaagcaaacccatcaaagggaagatctgcacgctgaaaggtcagcagttcccttttccccatgggatttgtgttagcaagtttgcgagtggaagatgcatttggaactgccagtcccttacagccctcacatgggaggtgcaatgttcatcctgtcactattttaaaactcgtctcagggttgggagtaactgaaaccgttttgggcttaattttgcatgaggacgtagcagagcatgacagaagggaaaaagagaaaatgctggcaaaggagaaatggccctaagagggaagccggatccctagctgggtcggagtagatgagcggggaatgaggggctggaggatgcagctccgagcgtgcaggggtggtgtgctctcgggagggagctgctgcggagctactaaggagggaggctgaggggtgggagaaagcccagggctgtaatcgtagcccctggagcctgatttaaaagactggaggaggcaaaacctttcctgggtgacatccatccagggcatgaccctgcggcctccgtgtctgctgtgggcgaggctgtccctgcagccagccctgcccccatcccttcccttctagggatgttggagtgtggggcagcccagcttctgcccacagcacagatgaggaactgaggatgcaggggcccgtgggggacggcacacggtcagcccagaattaggacctaaggttggccctacgggttcctgcagcacagacgtgcagcatgtgcacccacatgtacacacaatcaggcatagccacagagaatcacaccctcccacgcacacccacacccacgcaccctcccacaggcacacgcgcaccctcacactcatggtctcgccctcccacaggcacacctacactcacccacgcctacaggcacacaagcacacactcctttccccccgcaatccctgcacacccgtgggcacctatgctctcgtgtggtctggatctgccctctgtgtgcacagcctgtgcctggcccagcgtgagtgactcgtggatgctctgcaggtgagacctgaggtgagtgtcctggcaccgcccgggcctggctatcgggaagctccgcccagacggccgcctcctccctggcgcgggcctcttccctaggaggagctcgttagcttgtttttccatcggtattctttgtcctcagtcacccagacctggggctgggcactgccaggggcaaatgtgccatgtggagaggccaagcgggggacaggggcggcttgtccgccaggtggcaccgaggcggctgcgtgtggggcagtgttcccactctcgtcaccagcccgcacttcccgctgcctctgagtattctgtgggggctgccccggctgcagccccaggtgtagcctgctggaaatctcacggtgtccaggccccatccctaaccggcccggggcatccctgatttcgtgctcaccgag

SEQ ID NO: 150 - DNA, 1686 bp, synthetic construct
  misc_feature 1..1686: note = Description of Artificial Sequence: Synthetic polynucleotide
  source 1..1686: mol_type = other DNA
gctgcacacagagcgccactcttcagcctctgtttgaccatgaaatgaagtgactgagctctattctgtacctgccactctatttctggggtgacttttgtcagctgcccagaatctccaagccaggctggttctctgcatcctttcaatgacctgttttcttctgtaaccacaggtaagaaaggtacccaaggcttatgttgagggcggcatgcatgtggagagcttgtggatatggggtcaaagaaatactagcagtttctgggtactcaggagggggttatgtctgaatgctggatgtcacctgctcctagaaatattttagtctcctggttgtccctgctggagctgtccacagccaggtgacgatgaacacctcctggctaggatggctagcccagtctcaggaatagtggctttgttacactgtatctgctcctatgtctttactactgctgtccattcttttgttcatttatttactcattctgtaaattgtctatgtcctttaaaagggctaaaagacagcaatgctatttactgacttagaaggtaaatacattccaaggttcttcaagttctttacagctgggcttgttccaaggctggcatttgtgtagtggattcctccatcagctggtgtggttgttcagatgaccttcaagatcccacccaaccttgagtgttaaacttctgtgattgagcaaaacagatataaaagctagaattacactctctagcccctaagcaccttgagtgcatttatttggaagaagaaatcgtactggtttctctaatggaggggcttctttgggagtgtaatgttgccagttgtgaaaaagctgagacctgtatgcttggggaggttctggacagcagaaaggaaccaggtgggatggaagcagccttttgggagaaggaaatgttagtaaaaagaggagaatgtggactggtgggtgagaagttgaaaacagaattagtagaaccatggacagggaagtgagctcaaatcaccttgacctccacggaaccaggattcaggcaggctagagatgctgcagtgagtgtgggggtggggtgggggtggcctggaactggtgtacgtgagcagcgacacaagcccagtggggacactgatgtccgagcactttacgtatgcaatctcttttacataggcttctctgtgtaccccattcacccagacccactttacaattagggacctcatcccactctctccccttccccaaatctgccaatccagccacttagagggtcaaagtgtgcagctcttttttttttgacatcttcctaaccagaggtggaagttccctctaattactgtcaatcacctggaacaattcctcctttggtttccagtgacaaattaaatgaaatgatatagtgggcttatcacaggggatgcaggtttgaggcatcttgctgggaatacatcctctagagtcactgcatcttatttgcacattcttctgggggttcccgggtggctctccttggatctctaaatgatgcaatgttagcatgcttggattcctattctcactaatggagaaaaaaaaatctcctttttaaaaaatgcacttggttaaaaggtgaaacagatgatagctttggaatttgcaactatgatattggttggctggatgagagcgctctgtgtgcagc

SEQ ID NO: 151 - DNA, 1685 bp, synthetic construct
  misc_feature 1..1685: note = Description of Artificial Sequence: Synthetic polynucleotide
  source 1..1685: mol_type = other DNA
ctgcctgcttgatagagcaggaggcctgggtctggactgcggtttgggtgactgcagcagcacccggggagctcctactccacctcagaaggggcggggctcccaccagctccatggagtgtgcagccccagccgtgcctcctggctgcagcctacagcagggaagatggcagcagctgctgccatcaataggattttaggtgaccatgcaggctgagcttctcatcatgaactttgtgttatgttagtcataaggttgggtatacactgcagaaatcgatcatcaagtggaaatgctataaaagcatctgagctcaaggagatttcagatacaagtaagttatattcctttgatataacacctcctacattaactcctctccctcaattcaggcctgtggcctcatggagagttccactagcccaactgccttaagaataaagaactagagactggtttacagatgggtctgcatcatatattgaccacacagaagtagaaagctgcagcataagactccattaagggatgatctttggcagggtgggagggggaatagtgaaggaaaattgttcaagtgggcaaaattttgaccagtatgtttggttgcccagtttgccatactaagagatagctagaattaaatatctacatgactcatgagcagttgttaacagtttgtctggatggtgagggacttaaaaggaaccagacctaatgattggtgacaaagaactctgaagaaaaggtatgtggaaggaactctcagagccagcacagagggtgaagatatttttgtcttacataaatgctcaccaaatcagacatccactaccaaagaagctcccaataaccaagtggacaaaatggtgtaccgtgttggtcagtcagctatgttcctcagccaccccattgattgctcaatgggacccatgaatacagtggccatggtgggagagatggaggctattcatgagctcaacaatatggatatccccaatgaactggacactgctcctgatgggttcctaatctactcacagaagacaccaacactgaggctcatagggaaccattccccaggggaccagccagccacctgatggcaggttgattactctggacttcttccaccattgagagataagagatttttcctcactagaatagacacatctactggataaggatttagctttcctgccttaaatgtttctgtcagcaccactctctgcagactcatgaaatgtctcattaactgtgcctgatcaaggagcaaattttacagtaaaggaagtatagcaataggcccatgcccaaggaatcttaccacaatacctcatcacccaggaacagctggcttaattgaaagctagactggctcactgaaaagtcagctatgctgtcaattgtgagataacaccctgaaagaatgttgtctgtcttacaagctgcagtatatgctttgaaccagagatccctatatggtgccatctcccatacaaccaaaacatacgtgtctggcaatcaaaggtgaaagtgagagaaacacactattatacgtagtaaaacactagcagaattttttgcttcccattcagcaacctagagttcttctggtttggaggtcttggttcccaagagggaattaaaggatataacaatggttccattgatttggaag

SEQ ID NO: 152 - DNA, 1685 bp, synthetic construct
  misc_feature 1..1685: note = Description of Artificial Sequence: Synthetic polynucleotide
  source 1..1685: mol_type = other DNA
gctgcacacagagcgcccaaatcattttccttcagaattgtgaaggtgcttcacagacatgatcataatcatagtgacaacaacaatgacaatagcactaataaaagcaaacactgattgagatcttcctatgcactagtacgtcttttatatgtattatttttcacaacatacacaatatatagggatcatattgtgatgatccctatatctcacagctgagaaaatggaggcataacagtaaaattgtttcaccaagatcattatacaaccagtaagagacagtgtctggaaaatctttcttagtgaccaaacaaagtcctgaaatagtactgaaaagatctcagctttcccagactagtaaatcaggggcctaggagtcaaatggacactaattagtgtgaaaactgataccaaaatttaggtctgttatagaatcagttttctttccactcttccatgctttctctttttgtctcttcatgtttaccaggttgctgccacatttacaagaacagaaagccaacttaaaattaaccaacacaataaactaaatcttgttacaagtgtttggttttataaaagagttaaatctttaaaatatctttattaaattattaaactcatcaatcatctaacaatgaaaataattgtagagttaaaataatacaagccagagctgaaagattcaggcctacattgtcaaggtgcattttagagaaaaggtttttctttccttttcaatttttcttcctttctctatttttctttaaatacttcctcacaaacacaagatcaagtatcaagaaaagtaattcttgcctgactcctgcagctttttagtaaaaatggaaattacaatgtgaactatctttcatcaaatggcatttataagttgggccatgacttttcatcttctatttgctaatcactattggagatacaaagggcatgccttagagacatattctaaataagatactttttcctatacatttaagccatttataatctcttaaatttcttcattgtacagctcactttattgaaccaattaccaattttctgcacgccaaagtgcaaaaaattccagaatctatgcattataggatacatctaggcataattcctcaattaatcatttctgataagcagtacaattcagtgttaaacttatgttattttcatgaaaatctgctgagaggtactactaaatgatgtaattcattattggaagaaaaaaaaacccttatcatatgccattcagccatataatttaacaaatgataagtacctgtatcatgctaggcatcagccctacacgattttcttccaaaaaatttaacatataatgtattgttttaaaactaaagtacttaaactcttaaatttgtaaatgtgtttttaccacttacatttacattttagtattataataattttacatacaagattgtaaagatgatatttaaccttgcaattaaactgtatctcacaagaagaatgagttcaataaatatcatgcaaggaaagacacagttcttcgcttctgtttttgaaaattactaaatattataataaaccatagccatggatatcacaataaaagaaacacatacaaatgataaaaactctgtgaaatacggttgatgaccagagagctaacagaacacagtaaaacagtg

SEQ ID NO: 153 - DNA, 1685 bp, synthetic construct
  misc_feature 1..1685: note = Description of Artificial Sequence: Synthetic polynucleotide
  source 1..1685: mol_type = other DNA
tcagaatcagagattctctgaggatgagagcccacgatgtctgagaacacggagaaagcgagtaccctgcccagcctagcctttcaagtagcattggctatgtgttaggaggtaattaaagtttgtctgtgataagcagctgggaaaaggctgaagccaacgataagcagctaaggagctacaaaaaaatgaccaagaacaatgctgtcagcagagggaagccagcgtttagattagcacccttgaagagtgtagcagggtagaaaggatagcagatgaattcaacagtccaggtactattctagcctctggcagccatttctagggtgactcatctatgacagtacaacttctcatgcctcaatttccatatctgcaaaacaagaggactgactcatatgcccccttcagtacccaaagcctcatcaagcttcatcatgctctgaattcataaaacctggacggtgaatgtaacatctttttccaggtgctttctcctttagaaacttacagcacccatcattaattagaaatttaattcatagctcccatttggattagaattatattttggtaaaaaaaatgtattgttgatttattttctagtctcagttttccaaagctaagaaaataagtgctgctaatgccttgcctccaccatctgggctttctggaaaaatgccaattatgtgttatgtgaaatccccccacccccactgcaattagaaatttcctgcattctgttattcaaactgtatctccctaactgccacttaccacccaaagttgtacagcgttactgtcaaaggtgttttcagctttttgccttggaaaatgtgttcacggtgtctgtactgatacacaagttctgcccatagggacaacaataatcaaaagaagtgagagaataaattatgcccatactaatgtggaaaacatagccttgtgattatttctattagctattaaataaaatgtatgtgaccaaaatgtccctttgaactctccaacttacaggtactaggaagtctaacattttgttcctaagttgggtcaattgttcctacttgttcacttgcaggaccccagcgctttacagttgtagctgtcattgggaggagcatgtcttatagacaaggctggccctggccttgcgggctcaccagcacctctgctgccctcaccacccatcccttccaatgtctgctatgctcaccacattgctgcagcgccactaaagctgggcaagcggtagccctgacttaggctgcagtacctcttggggtgtatttgctttccaccattactgatatagctgcatcattacctatcttttgatttccgctgtccccttccttatgtgaaaagctaatgccctccgtcttgtggcctattcttagaaggtatcctgtgacagagttgggtggcttcttggtaatccatagctttttattttgccagccagtcttgtattcattttttaggactgctgtaacaaattaccacaaaccggtggcccaaaaccccggaaatttattgtctcacagttctgaggccaaaagtccaaactcaaggcgtcggcaggactggcttcctctgcagggtgcagggagagtccgttccacgtctggctcctgtcttctggaggctgccgccatccttggcgttccttagctcataggcgc

SEQ ID NO: 154 - DNA, 1684 bp, synthetic construct
  misc_feature 1..1684: note = Description of Artificial Sequence: Synthetic polynucleotide
  source 1..1684: mol_type = other DNA
gagtatttgtggacctaatttcaagattattcagaattgtggtgacataagaaaaacatgaaaaactgaacctaacccacagtcctaatactcatttaaatggataatgttgactttatttcctatcatacattagtgaggccaaaaggttacagaatttgttggttaaaattcccccaagactcatttttcctctagaggaggtgctaatgagcagtgaaatagatcaaaactagtgagaaccatcgtcggagaatatgaggtaaggaaagagcctggacagtttgtatttcagacttttagttattgaacaattggcctcatagctgtgtgttcataggatgcacccagatttgagggggtgaaagtgtgaggggaggctgagtagcagaggcctgccagtgaggaaacacttcacctagcctaggagacatgtgaggtggttccttgcacccaagagatcctgcttccagaagagtgatgactgtgcctgaacccagccaaggattcaggtgtggagagttcctcactatagctaagccagatggtccacttttattttggtgaaggccaacctgaagcaaaggcacttttcttccaccattaaaaaaaacaacaaagcaaaaacagagacaaaaaagcttgtgatgtggagctctgccaagctagggctggaaaaaaaagtcccttgctttccttccaaggcagtatgtaaatgctgttttgtttgtgcagccaccggggatggtttagagtgcctcactaaagtccatggctgctatagaatctgatttttatgattatgaatatcctataagctaaccatctaggtctagttgtcacctccctgcacaatcatctttggttgaagatattgaattatactgcattgctatgaaagccaaatatcttcagaaagtgatcaccttaatctgtttatagaagctcgagcatgtgtttatgtgtagctctttccctaaaggacaggactctgatctttctgactttttctagagttcaggtgtggcaggcattaactgagacattaactcttcacccaaggaaggtttcttatagcttaacctaaggagttttctgcttagctagagaatttggaagaccatttttcatttcttggccaggttgtgctatttacaaaaatgaggccatgtaattagggccccggtgccgtgtggatccattcactggtacataagagagactacagtgttttcatgggttagtggctgactgtgccctctctgtttcctttaatggtgaatatgtcactgctgagaaggatggcaaccaagtcctgacaggcagattttcagaacaaagtgttagtgagtgaagaaaggtctgtgcaagccaggcgaggtttgtcactgagttctaaggaacagttctttaaaaaaaacaagcaacttcccaatctgtgtctaggatttagatccagcataagtaaaactccaggtagagcaaaacccatttagcatatgctgggaactaccatgcccgtcttccatggtgcacttacagaaatgaggaggggactgggcctcacagcttggctccagctgctgtgccccagaagaaagagccatgtgcagtggccatcccatccattcactgtggcccatcattgttggcagctaagcgaagatgctcgcgggtggttagc

SEQ ID NO: 155 - DNA, 1683 bp, synthetic construct
  misc_feature 1..1683: note = Description of Artificial Sequence: Synthetic polynucleotide
  source 1..1683: mol_type = other DNA
gcgctctgtgtgcagcttactatgtatgtatatattgttttataaatagttatttttttactggtcaacgtatcataaaagttgtatctattgcaatagactttactaccattttttaaactgcataataatgcactgtatgtactacaatgcaaaccccaccctgtcctagccacagtgatgtatatttaaggcatgtctattaaacagggctgtgacaaacatccttacaaatacatctctgcaaggttgtatgatgatcccctcaggataagtggaatttcagagtcaaatggtatgcacattgacagttttgaagcacattaccagattgctattcagaaaaatgtattattttatgttcccattaactggggtttgagggtgtgcccatccctgcttgcttaccagctctggatattgccagtcactttaatgctttccagtcctattgggtgaaaagtaatctcatgggatatgcatatctttacttctccttcccctcccctttcgcctgccttgtgaattgttcatgaacttggtcattttcctgttgaggtattcgtcccttcctgattgattttcaagctctctttttgtataagaatattagctcatgtgtcacaagttgcaaataatcctcctcttcacttgacatttgtcttaaaaatttactgtgctttttgcctctagaagttttaaatttgtacttagtcaaagctatcaatacttttctttagaatttagaatttagattttgcttaggaatagcttctccaagttaatacaatatgactttttattttcttccaatacctttatggtttagatctttcaactatttcaaaaatattagtattattttcttttgaatgactagaacattatttcagtaactttataagacaaggtgaatcttaaggggatttgcatggcccaaatttgtatttaaatcagagacaaatgctcagattatccaaccaaggctgctaatattagaccaatttcttcccctaactctgtatttcatttgaaaaaaaaaaagtggttttaatctttagttaaaatgtggtttttgcctggatgtggaatttctttttttaaaaggccatgtggcgtgagtcatgtaccgagaattaactgaaggtttctttgccatcatggtcacagagaagaaaaaaaaaaatgtaaaacccagggacagcccacaaaatatccttcctgcctcctcggcccttgtacagaataaagacgttgagggtagttgaacatcttttctcaatggttccagaggctggtgtcagggaggacagagggagtggggtggcctgagactgacctgtcttcagccctccaacttcagtgcagtctgttaaaactaatacttaaaaaacaaaagaagcatttcaaatatctgacagttattattagcaacatttgaaggctgtcatatggccattgaggcaggaaccaaaaaagcaatgtcagcatgtcagcccatccacacaggaaagcttgaaattaaaattctcaagtcctagtttgattgggtgggtgggttttttaagacaaaaagcctgtccagtagagaaatagaggatatttttatacttaccaatcatttttcccagtcgacttaattgtccaaagaccatttgatgacattttggaaaaatgaatgca

SEQ ID NO: 156 - DNA, 1680 bp, synthetic construct
  misc_feature 1..1680: note = Description of Artificial Sequence: Synthetic polynucleotide
  source 1..1680: mol_type = other DNA
atatattaattttcaatctatctaaattttaataaatgcctttggggatactaatctctcacttaagcatggctttagatgcatcctaaaatatttaatatgttgtgctttcattaagttcaaaatattttctaattcccattcagatgtttattttaatgcgtgtgttatatataactgtgctgcttaaaatccaaatatttgaggatttttttatatttttaaaacaatattaaagctaattgtgctatgattggagaatatactgtagataatatcaatccgttgaaattcattgacatttcttttacgacctaaaaatatgttggtacatattccatgtctacttaaacaagaaagtgcattcttcaattgttgggtatagtgttgggtaatgtctattaagtgaaataagttaataatatagtgacagtctcctatgttctacatacaaatttgagtaaataaacatttaaatttattttatattcctgattattgtttcatttaacataaattctcctctttatgacttacttttgctcaaaatatactttttctgatgttagcctatctgcatcaacttaatttggttaattttagaatggtatgtttttagtggtagacacttttaccctatttgtaaacctatagctaagttttgtttcttgtaagaagaatatcattatgctttgaatttttatacaatctctcaatctttttcttgtaatgggaacatttaatctgaataaatttaattactgacatatgtgtttatatctaccatcttactttttgttttttattagtctcatagattttatgttccttcttctgttctttgttacttcttttgtgataaatacagtattttgaacaatttcatttttcactccattaattgttggttgtatataattcttttcatggttaaactagatattccaacatgaattcttgttatagaataataaaaattagtatttttaccaacaaatttctgctaaatgcaaataacttagaaaaatttaattgtatttgatctcatcacttctatataataacaatacactgttaacctatattttaaaccccataaggtattgttttgcgtagataatatttagattgacccacatatatatatcttttttgtttcttaggctttccttcatttttatgttcctatctgactgaataatctagcagctcccccaatcctgaccgccaccttatttcttttaggacaaatcctctgctgacaaattatttcatattgtgtttgtgttgaaatactttttttaaccttcatttttggaggatattttcacttgatatagaattctaagttgagagggtttttttttagcactttaaaacatgcctttttgatgtttttccatcgtttttgttgaaaatgttctgtcagtcttgttgtttatctccaggtaaagtgtctttcgtcatccctacttcttttccatgactatctgatttttcgtttctctttgtttttgttttttagaagttttttattgtgtgcctaggtacgtagttttaaaaaaaaattcctattttttacttacctcgtttgggcttatagaacttaagtaatttgtagcataatgacttctaaaattcttgattactatctatttaatatttttgttgcttaattct

SEQ ID NO: 157 - DNA, 1678 bp, synthetic construct
  misc_feature 1..1678: note = Description of Artificial Sequence: Synthetic polynucleotide
  source 1..1678: mol_type = other DNA
tgcatatgtgggtgtgtctcacacacagacacactcattaactgaaagccaacagtgggctgggcacagggacaggtgggagaagggaaagaaggcagaggtgagcgcttctctcaaggaactgatagtctcatggtggaaggggggccgccacgagtggcaagtgatttagaaatacaaaagagatcaaagcagatgtctggggaggcacaacaaatgctgtgtgagtggagaagacgatagagactagagatgccaacagcaggttgggggaagcctggctcagcggatcagccttgtggggttgttctagaggatgtgatggagggccagcagccgggactggtgcttggaaagtgggcaaggcattgcgggtctgggaaggggagaatgagacgcccagatgggcagtggtgggcaggcagatgtgagcaaagaagtagttcagggacgtctggcagtgtgccgcacacaagggcaatggtacaaggtgcaaatgaaatctgcctggaaggaaagatgtccccctcagaggggtgttcacttagaatcagagggagacagcccagcatgtcacaggcctgagataatggcatctgcaaatctggaaaggcaaagtgtggcctttgggacaagcgtcacatagctgtcctgtgacgctggccggccagcccttgtcagaggcaccagttaaggctgtttagatttcaggggtctctctgttcctcctatcttggggaccagttatgcttgtgctgtttgaatatctcccctgactctctcagtgagcaccccctatccatagagctacaccagggtgactccacacatgcatgagagcagggacaccatcacatggtgacttcttacagcacccaaaacagcgccaagtatacactaggcatctggcatcagctgagcgaatgcagaaggcattactgagttatgccaggcgtggtttgaaagtggccagagaggaaggagctgtgcaaaggtaggaggagtggggtggcacggcagggtttcatcagctagaagtggggtagctctaagcccctccacgacccttgctgtgctcctggcctcgtggggtctgatgcaagacctctactaggaagtatcagggctggctgggaaagtcgagcctcatcagttggtccctgcatttatttggcagaacagggaggccaggacattccgggaagctgggagcaaatcaatttcaggtcattcaattgcagatcaactagtctaaccctgtatcttgatgaggtcaaaattgagacccagggaggggaggtcacctggccaaggtcaaacgatcagagtcgggacatcaagatctcatttgctgaccacatgtacattgtcctgtggtcacagtaaaaagaggaatcctggggagggtttcacctccttgggtctgaacaatgccatccccacatccccctacatagtcatgacaggctctactagaatcatctcaagcctccttcttcaccctaagcctgtcatttacccataagatccagggagggaagaggcctgaacaggatggggttcagtggcccgtctgccatagacgcccctctacctggctcctgtaggctgacctttcccctcgagtctctagaagcttttcctgcctgttcacccaggggacacaagcagctggtta

SEQ ID NO: 158 - DNA, 1675 bp, synthetic construct
  misc_feature 1..1675: note = Description of Artificial Sequence: Synthetic polynucleotide
  source 1..1675: mol_type = other DNA
aagaccctttcgcctccgtatcttcatcctccaccgtcccccaggtctctctctccagaaataatcctgttaggtgcgtttagtcagaatcttccttaacccagacatttcctcttagtaatttctcatccagtgatccctaaccttcttggctataaattcccacttgttcatgctgaattcggagttgagcccaatgtctgttacccactgcaaaatctcacagccgggatcccaatacctaccaccatggtcctgaataaagggttctttgcatgctttaacaagtgtcactgaatacttttttatttaacagaatctatcatacctttcttaagggcaattactcttctaagcttctcatcctatctgtttcttctcactggaaatcttcatctaagactcagtatctgatttcccattgggaccatttctctgttgtagtcgtactaggctgaggaaggcacaggaagcagcagggaacctggagccaagggtcaatagaccccacagagcccagcgaagcacgctttacaaaggacacacacggcatgtacaggtcacacaaggtcgactacgcacccctcacagtcccgcaactgcacccacgtcacacaggcaagccggtcctgtcgccgctgcgcggtctctcacgctccccgcctgtctcctagagacgggcccctcctccgcagctccagcaccctagggcctgaggaggcgggagactcgcccggcccgcctgggggcctccgcgctctgagcgcctcctgcagccccactctcaccgccacgcagggtaccacgcgggcggcgggctggggctgcagaggctcccgcagtgacctgcgccgccttcttcaggtggaaccaaaaggtcccggaaccggagccaggggtccaagttttctccgttgcctttgtaatatgtagtccaagccagaacagtcaggaccgcaggtaccggtgagaaatggagtccagaatcctaaaaacctacgagaaatacggcagcgaccacttggaccgcgcctcccacccaccgctcgagccccggagacttctgggagtggccgccttgcctcgagtgcgcatgcgcagatcggccactactgggcccctggcctgaggcttagggtggagttagtgcgttcttagggccagtaggaggcgagtctgagtagaaactgatccaggtagcctcggaagggatcacctgctggatgggtgtgagctcctcagggtggggcgccgaaaccctcatggctcctgaggtagagccggcctccttggtaacacatgggactgggacttttaataccacccgacaggcccagcttgtctcgtcaagcgctaagtaaatggactcacgtcctatatgagggtttgaagttccatcacattcttcaatacatgacattatgttcttcatctttggacacgaatatatttgactaaaaatttgactaaaaaatcatctgaagaaataactgctaaatagttttattatttttgttctggaataggcttcttgaagataaaataagaaatttaaaaaatttttttgatccttcatgtaatactttgtaaatcttcatagttatttagaagcatccaaaatttccaaatggtaaaaaacgaataagaaaaatttttaggtaagtaaatttggggg

SEQ ID NO: 159 - DNA, 1674 bp, synthetic construct
  misc_feature 1..1674: note = Description of Artificial Sequence: Synthetic polynucleotide
  source 1..1674: mol_type = other DNA
tcttataaagcttcccaacctcattcccatgatagcccattaattcattaatccattaacccattaatccatgagtgaattaatcaagagcccttatgtcccaatcacctcttaaaggccccatctcttcatatggctacattgcagactaatgttcaacataagtttcagatgggacaaagggaaactttcaagggcatcctattcaccagtttgcaggaagcccttctgaccactcaagagcctcctgagttttccttctctgaattcttatcatattaataatctattccacaccagtaggactagtttgactcatgtccttcctaatctcttgtgaatgtaaatcaagtagttatatatctcaacttgaaattataatcttttgagcacgagagcatcttacacttctatatctgcacattgtacacatgtaataagtgtagttggatgttgacaagtattgaagaagcagataaagtcttcaaagataagaatttgtatattttttatatatctcattaagtaatggggacatttaatacatactaaatatcatagcaccacaaaaatggaggaagcacttcttagattctaacagaatccctgtcttttctgtcttgatctatatttattcttcctgtaagtaacaagcacatggttgagctatacataattctttcatttaaaggcagttgttccgaatcaagaaaaacaaaattaaataaattctgagaagggaatgagcaatagtaacaggctcaacactcttttgttaggggattaaagcattaatcatcctattatctgctattttgagctttgccaaagttgctagaggtcaataggaattagttccaattaaaaaactttagaactttccttcttatatcacctactgttttggattgaaagaagatggacgatgataacatggtcccgatagtctaattgcagtttctttccattttttgctaagaagttgtagaaaaggtcactttggattttaaaaattaagagcttcattgtcagagttatcactaatgcatataattactattttagattatcaagaaggtctaaagacagacattttattttaatattcactgttaaactgcattagtgacatttgctaataacctgaggaagttacctactgtggtggtgagttttgaattgtaaagtttagcgttttgacatggcatgccaacactacgtataatacacataaaaagtaagaattaataaatatgtcaattaaaactgttaaaaacctgaactagtccccaataacttcatcaggaaagacaaaatgtaataaacagtagcagttatttcttgacaaactgccgaatagactggtttgcagaattgctacagttcacatttagaaagttaagagagagtcctggcagattgagattggcaggtaaactaattctgaagtggtaaacatgggtaggttaattgttgaagcagcaagataatatccttcagagaatgcttccttacctgatgcattgattaaaaaataaaaattcaatgtttccagtctttagataactagtttgtaatattaagaaaatattggataattatccagcttttggtatttttcaatcattcttcaaacatctttcctgggcagtgagatgaaagctcaaggtctca

SEQ ID NO: 160 - DNA, 1673 bp, synthetic construct
  misc_feature 1..1673: note = Description of Artificial Sequence: Synthetic polynucleotide
  source 1..1673: mol_type = other DNA
atatgtgccacattttcttaatccagcctatctgaatatcttaaatacctctatagaaacactgattttgctaataatggtcagtttttaggaaatgttctcaaagaggcagcttgaaaaatatcattagtttgattatttcagacccgtctaaagcacatggatgaatgttcatcttatgtatataaaatatttacatattcttcctttccttgacaaaaattacttcttgagaacccatgctgcctgaaatgattaaaattacatgtacatgttcaaaggaagaacaaagagcttaagtagctaaattagtttggactagtgtgtagtgttacttcctaccattaaggcaggataaaaagaaatacaatagtttcactaaaaacgaaggttttgttcatttttttctcttcatttctctgtttactgctgcatgacaagtagagaaaagacgaagcatgttagaatccatggcagagtctgctatgtatcttggctctggtagactatcaaaacctcaattaactcattttcaaaataccgctatgatagaagtttctctccctcaaggaacccgattcacttatagttactaatctgcaaaaaggcacagggagactttcatgaagaaaaaagatacatatggtaaacaaacctatgtattattttctttacaaaatacacaagctaaagctttgaatgaaacaccaggtgggggttggcaagatattttaaatatttccaaaagctcagtaaaaatgttattgacattaaaacaaaagttcctgatcttgcttttggcttgcattgctatgttgactaaatgccctaattaggggttatatatgtctaattggggattacatatgatttaaagtgaaaaataattatcacatggtaaatgtagtttgtttagtaggcagatggtttcaaaaatatgaggtccttgtgggaaaagcataatgaacaaatccttactgatgaaaatgttggaaaccatgagcctgtactaatcatttggcaattaattgtcttctgtacttcggctgccagtatttattatttatatcttaacttctgctgaaagcatttacatagtctcacactacatactgttctgtcaatattttgattattttttaatcagccctatgaaatcatagatctttaaggaaaaggagatatagatatctataagaacattctgtttttctaacaggcagtttctggcacttagtgagtggtttccctttgtcctcctcgctgaccaacgggttgttggtagaacttttccagtcagatccgttcattgcactcattcaacaaatacttactgagagcctactatgtatcaattgttgtaccaaatgttaagtgtagttaggcaaaggagatatatatatatatatggagtaggcagagagtgttcaaggaaaagggaacaatttatgcaaagccttgaagcaggaaaaagctgggctagcctcaggaactgaaaggacagcaggtttaagctctgtgggcaaagaagagaacggaatgagatgagcttggagagactagcaaaagccaaatcatgcatggccttgtgggccacagtaagttcttaaaagtttactctccagctgttctcagtgaagatattggggcagagttggactgaagatgtcagg

SEQ ID NO: 161 - DNA, 1671 bp, synthetic construct
  misc_feature 1..1671: note = Description of Artificial Sequence: Synthetic polynucleotide
  source 1..1671: mol_type = other DNA
gcgctctgtgtgcagctaatcctagaaggcaaaaaaaaaaaaaaaaaagctaaagttgcatgcatggcaaacctggcaaaaggtcgacaatcaccatggatgagaacgacacacaccaatggtggctatggccagattacgcacagcacgaaggcgcaaaggcagcgcgtggaaccacatgggacagccaggcggatggaaaccaaagacggcgaagcacaggagggtttgcggtggtctccgggcttgtctccgggtctgtgagtgcaggaatgtcatacgcttggatacctccaattctagacagctccttctgtccattctagacagctctttctgtgccgcttgtggggaggatgggagtgaatttctaaaatacttattcattttgccttggtattggcattctaatgacaaatattgaggttataattctaagtaaaataaaacttttatccaaagctctatgaacagctcaacaagtgaaataatctaaatgtccaaaaatatggaaagatgatataaactgtgatgtagccatttgatcagtatttctgagctactgggtacacctatacgtgtatatgtatatgtgcatgtatatgaatgggtatgcatacatatatttttttaaatgtggcccccgccctaggatctgtaaccctaaatgggttaggggactctggcctctttgcataagtcttgggaggaactctcttatgtagaggtcagagccccagttttccagccctccttgcagagagaaaatgggccgtggcccaggtcctgccagtcaatgctcccagcagggccgagcaaccaggggctggcaaagaccctgggaggctggctttgcccagagcagcagcagcgcccagcatccatggtgccggcacaggaaggcaagctccgggatgagtccggcggcacaggggttctgtctttctgtggttctgtctgtctcaggggttctgatcctgggcagcagccctgagttcgtggccaccacgcctggtttctcagcccttccagaagggctgcaagcgatgcaagaggaatatatttcttttcctttttctttttctttttgctcaaatggctggactggacttgctttctgtcgcttgcacgtgagaaggccgtctgagtattctggtttggcctctcaaagtttatggggaaattcttatgatatagtgcttagtaaaaattagtactaaacagctaatcaataaattataatagtaaacaaaactaaaattgactgaaaaacatagcacaaaaattctacaatctatatgagcaaatcacaaccagagatatgtaaaaaggggtaatatgtcttggccaagtagaatttacccaaaaaatataaaattggttcaagattaagaaaaaatatcaatggatgaaatctactaccttattagaataaaggggggagctatcatatttcaggaaaaaatgtcaataaaattcaaaatcaatttaagataactcatagtaaacttgaatagaaaaaatgtccttaattctgtaaggggcatctatgaataaaacctactgcaagcattacagttaatgtcaaagtactgcagctctccacctgtgatggttaacttcctgtgtctattcggctaggttacagtgctcaatcatttggtcaaacag

SEQ ID NO: 162 - DNA, 1670 bp, synthetic construct
  misc_feature 1..1670: note = Description of Artificial Sequence: Synthetic polynucleotide
  source 1..1670: mol_type = other DNA
ggtccttctgaacttgacccatattctctccgatggagaggccagctctcagtctgactgaaaggatatgatattgagtcaaactcatggtcggcccagtgttctgtctatgacagggctcaaagggacattggccatttggcaggtggcagtccactttctgtgagtaaatgtgtcctcattaccaataacattaactggcccattacagcccctaattgttgctccatcacctccatatcacctgcagtgggaatgaggtcttcagtttcattttataaaccaacacgtgtaggccaagccaggtctgaccctgaagctctacaaaggcaagaccatctgtcccacatgagcactgtgttcctaggatgaggtcccaagtgaaggtggatgaaggatattgggggacttagtctgaaaaagaagaggatgaaccccaatatggtcatggtcttgcagtggatatatgcttatggtgagaaggaaggggccaggtgtcagccctctccactgagaacagagtagatagaagaggatttacattacagaaccctgagagatttagacttgatatgaagggaggtttttttcatggcaaagagagttacattctaaaatgagctcatagaaattgcttagaagttcatacatggctgattgagcaggggcatccatgtggaaagggacagactggacctgatatcaatgtgctgtctctgtctgttgtcctgagtgcagagtccagatagagctcctgacagagctggccttccgaacagcaaccactcacaggcaggctcagcggctccccttccctcctcaccacctcctctgaaagcgcgctcttctctcctctgccgtgcctcttctctgctgcaaagctcagtggacacgcatccactcctcaccctaccccatcctcacctggtgcagggcctgcccagggctgatccagagctggagaaaaaaacgggaagcaaggttaccccctaggactgctattgtgcttccttatttcaaccccgtggtccaccttgacgatgtatgaagcctttgtcttttcctggaggatttaagtaggaaaaaaccaactattgggtaggtgagcatgactaagaccttcggggcctgttgagattcagaagaccactgccaacaacaatgaaagcggatgcctagacactgactatgatgaagatgacgctgtagggtgcacaggagctaataagtctcaggtttgttgctgcaattaattgcaaagtaatggatataactttctttcaataaacaaacatttgtcaaatacttatggaacttggtcctgggaatacaagatcaataagatggacctctgcctttgagggcacagccatccattgggccagactaacctgtaaacgaataatgaattacagcaatcttatggtgccatagagggatttattcaataagctcagacaccacaggagagtctttttttaggagggatttatttttgaacgccttctacatgcctggcattgtgctggctgctggggatatgtggagaagaagcagacataagccttgccctcctggggcttccaactaggttaacacgcctcgctctgcctagggagctcagacaaggctccatgaaggagaagacccaagtcttgaagcaagaaagc

SEQ ID NO: 163 - DNA, 1670 bp, synthetic construct
  misc_feature 1..1670: note = Description of Artificial Sequence: Synthetic polynucleotide
  source 1..1670: mol_type = other DNA
agccagtagcactgtgttcattacaggggtgtgtgtgtgtgtgtgtgtgtgtgtgtgtgtgtgtgtgtgtctgggagacaggaggtgagattgctttttttaaaggataatgaagggagcctctctgaaaacaatttgggagtaaatgtgaaggacatgagggaggaacctcatgaaatctgggggatagcaagtagatagatatctgggggagaatatttctgaggaagatacttttgaacttctttggattttttcatatggattatctatatgagtaatgtctatgctcatctactgcttttccagttgtgcttatcatggtagtagtgataatagtaataacaacaataatgtcatttttaccatgtaattgcaagctttgctttaggaactgatgtaaatctttcataagatcttactagagaattaattagctaattagttaatttacttattcattcagtcacacagtgagtgtttataaatgcccactgtatgtcagttactatgtgaagtgcaatgaacaccatggtgagcaggacgagttagtccctgtgttcgaaactgttaaggtggggagactgacaaatgaaacaggcaattaaaaatgcagtgtaaacagtggtccagtgtagttaaacgaggtaaggaaggtgcagcagggaaacaataagccaaacaaagaagaaaccaggtgtatgaataaatagggaatggcgaagctttctttgaattggggtgggatggggtgtatggaacagaggtgggcaaagtaggtgagataagtggctttggaaatgaaaccaagttttgtttagtgacctcttacgttgtcagatggggttaaatccataagggtctataaacattggcctgctatgtagaaaacacatgtttcaatggcaactaagttgtgagagaggttttcattgctaacgatgggctcctagcatgaagagattcaggtaaatcctgcctcgaggagtgggctgatatctctgatcagagctggctgcaagcttgagtagtgacaatggtgagatctccaaaagtgccaactcctaccacccaacacccaggagagaataacttcttactgccccctcacagatcctgagctgagctaaacaacctcttcagttctcgcagtccacctctctcccccgctactgccccattcatgctgcaaagatgtcacaggactgtctacttaaagattatctttctaaagcagagttgactctatgtattctgtaaaggcaattctgcttttttgttttttttcaacactgacccaagaacacttggatataaacagtaatatcaacatggtcaggaagggggaaattccactggctttcttgtttcatttaacattctttgacttgggggtgatattaaaaatataaaaatattatagaacattttcaaagtctacttgctttataagtcccttcaaaattttatttgtcctctatgttcatagcaattttaaagtgttagtctgtaaaatattgtatctacatgtacagctttgtttttgatagtcacttctagaacagattgaaaatcagtcaggaaaattcagtaagaccgatttgtggtttatccatattcttatgtaaacctgagattctcacatttgtcactaatgacagtcataaaat

SEQ ID NO: 164 - DNA, 1663 bp, synthetic construct
  misc_feature 1..1663: note = Description of Artificial Sequence: Synthetic polynucleotide
  source 1..1663: mol_type = other DNA
gtgtgtatattataagctctttctacacatagacacacacacatataaataaatatatatataaatatacacacacatacatatgtacaaatatatatgctggaacacatccacacatatatgtgtggatatacatatgaatgagtatcaaaaggcatatacaagaatgctcatactagaaacattcaaaatatcctcatgaataaattacaaattgtgatatagttacacgatgaaatacaatgtcagtaaaaagaataaacttgctacacaaaatgaaacagatgaatctcatgaacctaattgaatgaaagaaatcaaaacaaaagaaaacactgcataattctatttatataaacttaaaaatggcaaagtatctatggtatcagaatagtcattatctttgggcaggaagaagagtatagtccttgagaaggggcacaaatagacttctgggatgctgatagcattctgctagtattctgcttcttatctggtgtcttagcttgggctcttctcgaaagtagaccctgaaatagggatttggatgcatgtaatttgagagttgatcacataaagtacaagtgaggacatggagaaggtaagacagggaagaagggaaagcaagcaaagaaagttgcactaatgagccgatgccactgcagacagtatgggcttattcttgctgctgttaactctctgagaaccatttggaacaggtttgtcctgctcatgtttcactggaggatgaggatggaggatgaggatgaggaggatgagcagtctgtgccacctaggaccagactcccaacctgttgtttgagggttgccccatgggaattaaccacccacgtcctctttctatcaacagtttttcattgtgacagagaaagtgcaagaccccatctttcccacatgcagttgaatccaggtgggctgcagggctatgatgcacagcatcagtaatgcctgttacaggctgtgtgctgattgcctggctgtgacaatttctcatgccatctccttatgactagtacgcttttatgtataagtgttacacttcaataagaagtttatttaaatattgttcaaagtaaatgcatgaactatgaatgcagtgtcattccagaaaaaggataatagctgagatgccttatatttaagagcaaacccttctcccaactactctggctcaagtttcaaggtgatccaatcagctagtgtttgtctcaataatagcagcatctcagagtcccttacatgacaaagttttgccaatatagagaatgatgctggccatgcaattcaacctgtgcttacaaacataattattcactcggtcactcagtcactcccttgttcatcgagtattgaatactcattcagtgagtattcaactgaccatgcagttggtcaaacactgcatgtggttctggtgataaaatgatgagcaaattcttcccccaccttcaaggcattcatagaccagtaaggaggagagatatgtcaccaattaaatatgacagaaatagtttagaaataaaacagcaagcctgggtgtggcggctcacgcctgtaatctcagcactttgggaggccgaaatgggtggaactgcttgagccagaactttaacaccagcctgggcaacagggcaaaatcctg

SEQ ID NO: 165 - DNA, 1660 bp, synthetic construct
  misc_feature 1..1660: note = Description of Artificial Sequence: Synthetic polynucleotide
  source 1..1660: mol_type = other DNA
gctgcacacagagcgcaggtggtgttttgtcaacaaacgtttattgtgtgcctcctatggtagaggaacatgagatgcaaaggaaaaagacataataccctgctttattaaaaagcttacaattataatagaaaacatacctaaaagaccaggattagaggagatatttgcaaaaccatgaaaggggaaagcctgtagggaaaagcccagtctcactgcagtgggtgggaaaagcttcaccatgttgacccctttcaggtgagcaatcgcttccttcagccatggtagctgccaggccaatgaggctttgtgtgaaggtgaacccttaaacagacatggcctctgacctcatgagactgacagatactccaggaggtgctgatggctccttgttgagtgagaggaggtaagggagtttattctatggtaaacacaaagaagctataaaagaccctggaagattagcctggtcctaaaatgtccatctcatctatcaagagaagatacaaccagaatcaggagagtgttctcaatcccagcactaatcctagtacaatagcgtattgtagttttatttggtatttgaggtctattttcatcatccatggctgaggcagtctccaggccaataagcagatcaatcgctattcattgaaaagctcccaggtcccaattcctattttgcttcttgtcctgattagctgtcctataccatgtagaaacctcaaagagcagtttaattgtttactttccaaaaatcataccataagtcagattcctgttacctgagggtcacgctgaagttactggtgaaggttattgtcatttgggcctttgtcatttgacatccctccagcatgccaactccctttcttgcttaattgaccgccttactttgtgagttttagcacaaggcaaaaaccacctctaactgtgcaagaagtcatatttctgctttcttgggctcctgggaacctatgataaagcttagctaatcatttggatgtaagttggacattgtctcagaacctggaaactctgcataatcctttctggcaaaaaaaagagcagcttcttcccgtgggcacaggggtggtggattgagcagctctgtccttgctcagatgtggtgtcagcagcactgtctattcccaggataatcagtgacgctatcttcatgaaatgagctcattggcattgtttctggtggtgaagttccacacctaactatctggccttctcagagcttctgtgaactacccaataacttctaatacattattttctgttttaattagctagattaggtctcagttgctttcaactaagactactgataaataacagctttttaattactttttgttttaaaatatctccatgtatagacaatttaataatacaacaaatatccccccaaaatttatctgtatcggtcaattttaacattttactgtatttgcctcttgatttgaaaaaaaactttctgatgtcatgacattcattcctgaatatttcagagctcatctcttggatgcaaggatattctccacataatcactcatatactaagaaattttacactgaagcaataatactgcctagaagataactcatattcaaatgttactaactgttcaaatttgttatttatattttt

SEQ ID NO: 166 - DNA, 1659 bp, synthetic construct
  misc_feature 1..1659: note = Description of Artificial Sequence: Synthetic polynucleotide
  source 1..1659: mol_type = other DNA
ttattttatttatcctattcaacagtttgtgtcaacttttaagataaagatgcatgtctttttttttaaattagaacaaattttcattatttttagctcaattttttccaccatttttaaattatatttgaaataataattaagaacatagcgatggctcttaatactgtacacatgttttttaacagcttttttatatttttcgtcttcctgactctgtgaagttctcatggagttattagttctaaattctaattgattaaaatgtcctaagaatctgtacagtctatagtgtgtaacacctagtttgtttttacttcaatcattacgtattttatcttaagcatgttaaatagctttttataatttacttcatctttcatttttctcttatatactttgataacttaatgaaagttatgtggatgctatcatatttttatgtctgaagtaattaaacacacttagtgtatttatttatctacaggaaatgaatcccctttctgagtttcttgggctacaagttattattatatttcagagtaatactagttgttttagtaaatattccttcatttataacatttcagaaacacctttttgttcatataacagtacaaaatggctgctttgtcggtagatgacctgacttctttccgtcctaagtactagctcctaatataaaagcctcatcattttctatatccagaagacagaaggggaaagagacgtgtggaaaaagtagattcacaacttagaatctttaatttgtaaagagttatcttcacattgcaattgggaaaataagtcatatgaggtcacaaatagatgtacaggaacctgggaagggggaccctggttcagtcgctgctttcaacacacagtcatggggactcaatcttggaaaggaaagtaagcacttacaggagggctagccgtttctggcaatacacaggtttttttcttcatgtactttggtttccagtttgtcagcacacccttgttctctctctctctcctttcctccgaccatcccccacctccatttattcccctcttcagttggttttgtggttgttttacttagatactcaagatctctgatcaaaaatactttctatattcacaactcagatattcacagctcagtcgtccttcatgatgttgactttgggggcagtgtaccgatctagctggtggtttgagtatgatacaggctatgaaactgtgtgtgcttctaaatccccaacagtaaaattttagcataaactatggcccagatagagtgtacaggtaggattgccttgtcccacctcaatttttaaaagtgagactggttttagttcccaacttaggctagtgatactgcccactgttactctacagacttctcattcctcaactagaatccaggttgctagcaatatcaacctctttttactttgaatatttgtttgatttctggttaatagaaacatcattttttgtttttgcttttgttttaagaggaggaggtggtgtcccaagggcatttatatctttgctctgtatttggaggagaatggagagttccaaatgatcagagcttgcacattactagatcccctttctataagtatttttttatatattttgtgagttatatttgttcatatacct

SEQ ID NO: 167 - DNA, 1658 bp, synthetic construct
  misc_feature 1..1658: note = Description of Artificial Sequence: Synthetic polynucleotide
  source 1..1658: mol_type = other DNA
gctgcacacagagcgctgttttagtagagacatgatttggccatgttacccaggctggtcttgaagtcctgacctcaggtgatctgcccacttcagcctcccaaagtgttgggattacaggcatgagtcactgtgcccaactctcaagtttcaatgtgcctatgaattatttctgattccaggctctctcttagtgatgtgattctgcaggtttggaaggggcccatgaattggcttctttaaaaagtctcctcttaatgctgatgtttcttccactacatccaatatagtagcactcagctagagaaagtaggcacagcacagagctcctgacacccaacgatgttaccacaacacaaatacttttggcccaaagtggaagccaccagtcaccattttcaaacatgtcattttctgctggctctttacagtttagagagcctagagaaggcatcaatgtttgagtaagtctgcatttggaaaacatgtacacatgagttaatacaatgtttactgagcacatattatgtgttcaaaagtctgttacagagcaatgttcaggaaacttaacatgatgtgagttaatcctcataacaccctgggggttgggtgctaagttttctgtaattttcaggatttaaatgaagggcctagcatttctattttttcttccattttaaaaattatttacctggaaaataaaatgtgcagaataaaagctatatcgacagatgagagggatggagaaaaaagggtgaactgttcagagagatgttttatatttatatttacctttttgtgccttgtggagcagctactgaatttgcaggagtggaaaacaagttgctaggtggggtgtctctagaagcactggcttcaatgaaaaagaaattacagcccccaaatatagaattatttgcttccatttatctgcttttccattttaggaaattgtgggtaccagctcaggagaggcagcaagagcccccacctgaatctctggtatcctttaatcagttctgtgagagaagattctagggtgagaccagacctggatgaggccatagaagagggtggatctgggcagggctggaacagaaagtggaccccatgtttctgatgttcatgctggtggagtatttccagttctgtctttcgtaagcctgcccaacagagacttaactcttagagcttgtgtaattttaatatgttttagccactttcctgtcaatttttataacacatgatcacaagaaacttaagcaaaactcttagggtttttaggacaattatatgagaagctaaaaacttatttttaccaagataaaagaaatagaaataatcataacaataacaataattcttctgtccatgaatagcccttcaggtggtgacatcggaacccaaggaacagcataaaggaagaggagcaaatgcagccaaggccccctgtgcagctcccttctcccttccgactacaggatgatgaattcagccattaatccatttcccttccgaccacaggatgctgaattcagccattaatccgtttcccttccgaccacaggatgctgaattcagccattaatccgtttcccttccgaccacaggatgctgaattcagccattaatccgtttcccttccgaccacaggatgc

SEQ ID NO: 168 - DNA, 1656 bp, synthetic construct
  misc_feature 1..1656: note = Description of Artificial Sequence: Synthetic polynucleotide
  source 1..1656: mol_type = other DNA
gctgcacacagagcgcccagcagcagcatgtatagaggctcatgcaggaagagaggacctaggaagccagatacgggccttttccagtccttcatagagagcagtgctccatgtgcttctcccctgctcacaggtgatctgtttctgtctcaggactgagatgatgacgtaaggaagtagtcacaaggcagtatggatagcaggcaagaactggggtcccggggccgcactgcctggattccaagcctgattttgcatgcatgacttgagacttcaggtaatttgcttaaactcattgtaactcagttttttctttataaattgatatttcatcatgcaacaactgtttattgtgctaattatttgggaagggtatcattttgggggctaggatatagccatcaacaaaccagataacgttcccttccactgtgcaatgttaagttctagaagggttataagcaatgcacaaatacatacatttcttccgggagataagagctgtgcagaaaaataaaggatggcaagggaataagcagtggggtagagtattttcatgatcagaacagtgttcactggggagatgacatttgaccaaaggtcagaatgccattaggagtaagccatgcatatacctgggaaatggtgttttgattagaggaaacttcaagtgcaaacaccctgaagctataagcatgcctgagaccatgacatgatctattaaatacagttgttgtgacgttaagtgagttagttcattaaagttgagcctgctagataaatatttcttgattaatattaggtattagtattatcagaatgcttcatactttctggcccagctggtccacttccacacctgacctgtggcctcgctaatgttgggggacactgccacctgctgcttcttgttggtaaaccattgagtgtgagtagcatgttgagaagctgatgtggagtctgatcttctgcccttggtgtccctgtatcttggcttcttctggctagatgttcactcagctccttaaatccactctgttttctgcttcatcagatttctaccattagtactgcctatgtcacctgtcaagtgtcagcttgccttccaacacagtgcctgacatccaggacaattgttgtatagggagatgtctttaaacacagaagactgctttcaatacatgtttcactagggcctgtgcttctgccaaatggctatctttggctttgagcctaagaacccatggagaaaaacaaagataccgagttatggtggagtctaatgaaagaaaaatggaccatctcccccagagctaccactgcttcaatgcattcaccatttaaggctggtacctgctcccacagactcatgactttctgaaacagctctgttgaatgcatttgtaatttgccactaaaaaaattatacttccacgtgtttacaaccttgtccatatctgggaaagtgacaagtagaaagttggctttctagtcctttctgaaggaagggtctggctttggtctgtctgtgcatacaatggtgctgtttggtatatgcagaagcctgggtacctacaggatttgcttagtgaatatatcttatatgaccttctggtccatcacacttacataatcccctaacataccatcccatag

SEQ ID NO: 169 - DNA, 1655 bp, synthetic construct
  misc_feature 1..1655: note = Description of Artificial Sequence: Synthetic polynucleotide
  source 1..1655: mol_type = other DNA
ccctgagagcctcccacctgagactggagtcgcccctggcctcctcggaagcagaatcctccctgccagctcagaggcacctgcagacccaagagtgtgtgtttcccaagcagcggaacagggactgaggatgcccagggcaggcctcacatagaaaacccctccatgctttccagagaaggaaaccagaaaaggttattacgcactttagaaaccagtgaaagagaagcacacaggctccatgagctgggcggagaaagtgtgtcattcacgagcactgggtctgcagctgtggggacaggagactgagacccggcctgcaccctctttcttgtctctcaggatcaagctgaagtgggggaatggctcaggatcggaaataaatatatcactttgaaaggtaaggctctgagggtcccagaagcccccagagatgacagcttcacctgatcctaggaacatgctgcttgtctccaaggaattcattttcagaggcctgaagggaacctcctaggagagaaattggaacccgggatccctctccatgggatgaagccatggggtccaggaagcaggtgttgcccaggaggggaccgtgtgggggaggggaccagtgaccacctggacatgcaggaggggctgcaggtccatgtgggcagctgtttaacatggctgagccctctctgaggccaccctgtcctctctcctcaggaggtggtcgtgacccccatgatggggcgtgtcaggaggcaccctataaatgagaaaacgctgcccaccgggcatctggctatcactcctggggccctgtggccttggacagggatgctggggctccagggtctaatccccgatcccggggtctcccctaagggcacacgcactcggcctcctgtaagtcccagttccctccctcgccaccataacccatctcctgctttccagactgcagaattctcttgaaagaattggagaaccttgaggtctacactttcctgctggaaaagtgaggctcttccccttctctcccgtgtcctccttcctaccaggacctaggatgccaccccagggcctggggctgatctgggaggggagatcacggccgttatgtcactaaagccctgggcaggggtaggcagagctttgtgaagtcagcaggggggccctggaggtccacaggtgcccagtgctcccggctgcagcctgtgcctcctgtctcctgcaggcgcctgaagaagctctctagggagggcagctcccatcaccttccacgcccagtccgcccaggggcagtgtacaaaccagcaccttctaggaaccaccggccacgtggggggcgtgggaaagcttctcccaccagcttccatgtgtccccacgggctcccccggctcctctggcctccatgccgtcatcagtcccgaagacctccatagagtcccttgggtctccatcatccctgagctcctcccaggcatcagagcctctgtgtcccctgaagcacccttcacaccggccacctgcaagcaccctatcaccaaacccgaccagctccacagaatccttggggtatctgtcatccctcagctcctcccagccaccagagcctttgcgtcccctgaagcacccttcacacaagccacatgggcgttcccct

SEQ ID NO: 170 - DNA, 1655 bp, synthetic construct
  misc_feature 1..1655: note = Description of Artificial Sequence: Synthetic polynucleotide
  source 1..1655: mol_type = other DNA
cgtagtcacatagatatttaggcattagaggctcagagggacctcacaggtgggaggggttgaaagaagaaaagcagaagaggacctcagaagcactcttaaacaaagtaagctttatatgtatatgtatatgtatatatgtatatgtattcataccttcccacacctatagaatcttacctctttgctttcttccagatccgattcactactaaagtcttccgtgtttaaattttcaaagtcagattctcctacagcaattggtacagtcacagtaagactggggttgtttatgaatgacctgtaatcactttcatcaataatgtatttttcaacactgctgccagttcctataccacttgtagttccatttacatctttaagatagtcaagatctttcccaatttctgttgtatgattggacatacaactgtctttcttgttgtttagatcatcaagtggtttaatttcatctaaaatcttttgtttcctaatgaaggactgttgaataaattcatatatttttcttttcacataagctactcctttgtgcatcctatccacagcaatttggagattattcatttcattatcatcatcagtggctgcaaggttgtctgcactaaatgagctcagaagcaaggccagaaagagattcaggaccttaaaaacaacaaaaacatgattataattttacaccaatatagggaagagcagattacaatcacttattctttcttttaagtgtggaaaaaactctaagttctaaaacttgatgagaaggaaacaccacagcatagtgattagaagatgggtgatctgaatttgtgactggctcaatagcacatccttggacaaagacatgatttctgttgctctcaagttctcccattcgtaaagtgaaattgaatgagctaatctaaggttttgttaactctaaaattgtatgagtagaagaaaacagatttatatgtgtacaatacgagaattcttaaaaatcactaatgtttccaagtatgcatttaaatgcattctataatttttcaataaacaaagatattaaattggatgtcaattgaaaaataaccattacaactcagaatgaagattaggagcttaacataggctgacacttgttttcttaatctattatagttctcatacttcattgttgactaagtagagctgtttatgaataatctctcatatttccatgagactggcacatgaatgtacatacctttagaatattttatatattactatactataaacagtaacactccaaatttaagagagataaagattgatcagttactccattatggtaatctcaggcatcattagccattcgagaactgatgaactcaggttggctagtgcatctgccatatgacatagagtgattgaatatcatatgctgcaatggggcaaagaaatggcacaagcattatgaactcttaaagacaccactttttagtcctagtctggatggtaattttgcactttctctctactttttttagacttctctcttccttggctctgaatttataaaatggtcccagcacatccttttaggctcatctcaatatgatactctattgtaattcacataaaaaatgtgataaagtgactgacaaaatagaatttgg

SEQ ID NO: 171 - DNA, 1655 bp, synthetic construct
  misc_feature 1..1655: note = Description of Artificial Sequence: Synthetic polynucleotide
  source 1..1655: mol_type = other DNA
gataaagtaagaattatatacatttagtttcatgccttgatcactttctttagctctgaagaactttcagcatttctcacagggctgggcttcttgcaactaatatccttagcttttgtctgaaaaggtcttcagttctcttccaattctgaaggacaatttctctggatatagaactctgggtcagtggtgtccttctttcaacacttaaatacttcatttaactcttctagcttacatagaatctgtgaagacatctggtgggattgttattcttttcgtttatggatgaggcattttttttctttttttctttggctactttccagatttttctgttgggctgtagttttggggtgacttgaatactttatgcccacctgtagccttttttgtttgtttttcatttggcttggtgtcctctaaacttcctgaatctctgtttttgtgtctgtcatagattttttaaaaattcttgctcattttactgcagatatttcttctactcctctctcttatttttttatcttccttctgatattttaaatatccatatattgtatcttttgagattgccctacagtttttgaaaattttgttctgttttattttcctctttttgtttcagaagtttctattgatgtttctccaagcttgttgatctttgtcttggtcatgtctagttaattataagcccataaaaggcattctgtatttctgttttggtgttttcatttctagcattttattttgatccctttttagaacttttgtctctctgcttacatgacacacaagtccttacatgacatttacttcttccatttgaacccataatgtaccaatcacagttattttaagtgtccagtctcataattgccaaatctgtgttctgtctgagtctggatgtgaggcttgttttgtctcttcagattatggaggatccttgccttcaggatgcctcatggttttttgttcatatctgggcaatatggggttacgtaatagaaactaagcttcagtgtgaagtgtgacgtggatctactgcaaactgggctgtgcttaatgttttctgtagctgtaggtttcagggcttccaactcctctctaatgtacaggtttctgtctctcttactgtctttgtgtttccctacaaactccttctcaaatagagtttgagctgtgcagctgtttcagctgtgacctgctgttatttcatcagaacctagtgcggtggcaaggatggtggggagacgatgtgttctatcctcttatgatcaaatccaagtctgtagtgggcctgtgtccccggctgatacctgctcaggtgtctcctggatttcttaggtaagagagggacgctggaggaggggctgggaattggctgctggaggaggagaactgcccttccgtctgggcaggaaagcactggccaagcatttcctctggggagcaggtctgtgttcaacacagcagctttcttcttcctcctcgcagagacgtgaggtgatttgtttgactgtccgctatgaaaatctagtggggttccagggtgcaaacacacagaagtgtggggtccttctaagactgcagccccacgcgctcctcatttttgtgtcagtccatgacccacctcaagaaatttgtcataaaac

SEQ ID NO: 172 - DNA, 1649 bp, synthetic construct
  misc_feature 1..1649: note = Description of Artificial Sequence: Synthetic polynucleotide
  source 1..1649: mol_type = other DNA
gcgctctgtgtgcagctacctttttgctcctataatatttacaccttggtagtctcttcgatctttcgcagtggcaccgtagctctgttttctgttgtgaatgaaaacaacatgctcctttttcccatgtagttttctatggagtttcttgcctccatggatccagcccaggtgaatgggaagaggcgggacaggccttgggtgggtggattaccagccatctccggggcttcccaaagagacgcaggatgtggcgtgttttatgaagtccaggctgcagcctccagcctgcttctgcaggatgccctgatggtagtgatggttacaaagcgcagctgaccagggcctcagagccaagctctgacgaaaacaacgtcctctccccgtctcactccttaaatcaccaggcctgctgcctagagatttcacaaggttgtcccaaattcactgctatgtaggtctcaggcttggaacgctcccacgacccccttctcacccccttcactttatattcctggctctgctccctgtcttctgcagctggtttattcactgtccaaaaatactggcaagagagtccccccacacacaattattttttttagtcttggtcttcacagctcttggaatttttattttttgctagctgacgtggaggccttagggaccatcggtgtttccaaagcgactccctaggcccgtcctttcctgctataatttatgttgctgttggtgggagttacgtcagaagactgcagggtagaaaatgcatctctaatttaccttctgttacccctcgacagtttgtgtgtggggaagagctggggagggaggggagaggaaggctcagatgcacttgtatgaaaagccagctgcatcccagcaggtgcagcaggggcaggagagtggagtgcagagctgggacacagcagggtcatcatgaggtgccgcccacatgcaccagaaagggagaggaaggcggctagcctgctaagacggcgggaggacggctggtgtaaggttatgtgcctgtaactggtttttgcttccacagtgaaaccccatctatgtgctttccatgtgccagcgatctggcattcatatggataatttttaaaaatttaagtattctacactgaagcataagttacatgtgttacttggacacctttcagaggaggccttaaacctgggatgtctgctgccctgagggtgcgttagcagctcgcagcacttctgaaaccctatggctttgccctgctctcttctcagagctcacagagccaggggccgccagggcagggaccagaactgccaggtttgtactgagcgtcctgtgtctctggatggtgaagctggtccgaactgctgttgtgactttatcttctggtctgtcttcgtttaatacagcaaacctgaaaataaaaagtggcatctttctcttccagcctctcttgattctacctgtccatccactctcaaagaaaggggcagatgttctgccatatgatcctgttggtctcagcaaacctttgctgcttctctgctctgggcttgtgtctatcaaggccccgaggactccacttcagcaggagacggtccttgttctgcaggcgcttgggaaattttggggtagagctcacctttct

SEQ ID NO: 173 - DNA, 1648 bp, synthetic construct
  misc_feature 1..1648: note = Description of Artificial Sequence: Synthetic polynucleotide
  source 1..1648: mol_type = other DNA
gctgcacacagagcgccagaattgaggtgtgatttggggagtgaagaagatggtagggtttggactcattctttaggtggtggagatccagaatgtgttataagcaagggagtaacatgacatacttggttttagaaagggtagccaggcagcagcatggagaagggacagaagggtttctagccaatcagaagacctgcagtggcctccgtgagtgataaggaggccccacccggggtagtggtaaaagagggattagtagacaagatcccacaggatgtccccagtcaggtggcaggaaggtgaggagtgagcctagtgctgccaggtctctgctctaggtggctggatgacagaggtatcattcctgaggcaggcaccaggcatgaagaacaggtcgagaaagcgatgagtacatgtccaaagtgcctgggggacacccggtctgatgtggtggcagtgactgctagaagccctccagtctgtactcttcttccacagttagagtagaccaagaattgtagcccaaggtcttttggaataaaaatcaattttcccagtctccattgcagtgaggtatggtcatgggtctaaattctagacagtggaggtaagtggaagcaaccatgttgaaccatacgagtttaagtcatgtgctaaggaaggcagagccacaggacagaagaaagctgaagggaggtacgtggatgtgccctggctggctgcatttacacttctctcttgcttaaaccactactactttgcatttgtctttcatggccaaaactaattcaaccagtgcagatgcccaggagggtctagggcttcggacagattgggcacctatccatatcctaagcaaagccctcctgggatcaaccttctggcctgctctctctgtagggaggtcaaacacagaggcccttctgtgtcctcacagctcatggtacgtaggggacagacagctttctacttcctttgctctctttgccaagctctgagtgctccttggggccagggtctgttgtccatgtagccataacagggatgccagggcaccttccaggctagaaggaggctagagggaggttccaagacactgcctgtctaaagcagtaaattataaatagggaaataaaaatataaacaaccacgcaaacattaccctggagcttcctcggtagagacggcaaagctgatcaaatgcttgggtttgctgtggatccagaacaggttctgaggttccctgaaaaataaaaaccagtacgattaacaacatcacgtggctaggcagcctctcaacttgctctacacgatgctgaagcagaacatggtgcttccttcattctcctgaaaacaatccacgctaccagctattagtgagatatatactgaacatgagttagaaatcggcacgtcccctaagatccctccttggtgtggctgcaggttgacctgtctgtggacccttttcccaatggagtctccaaatgtcccgtatgtataggttcctttcaggtttcttgatccctctttggcaccattatgcagagctagttagttccttccagccttgcattcccatgtccatcacttcatacggccagcaaagataccgcttttctctgtcatggtaacaggagacgca

SEQ ID NO: 174 - DNA, 1646 bp, synthetic construct
  misc_feature 1..1646: note = Description of Artificial Sequence: Synthetic polynucleotide
  source 1..1646: mol_type = other DNA
gggcagcctgtccacccttcttccttataagtcctggagtagtcactgccctgagccggggtccctctctgtcagcggaagtcagaggcactttgggtggggcagcgcaggagggagggagggaggctagaggtgtgagcacaccactggtgacaagaggtgggggccaagaagcaccgggaagcgggtgaccacggaagaagttcagaaccgtggaaggggcagctggcaacaggccagaccaagtgaaggaccctccactcccacccccgagaagcccctctctcttccagccaaccttccccatcccctgcctcaacatggtccttgccaaatgtccagggctttccctggggtccccagtttccagcccttctcctgggcagagggcccactcacacctgagactttatggtccttgtccccacccctggccagacacagaggtgacaaaaggccatggcccatccctgcccagagaaagcatcaaaggggcctctcccaagccagcacccaaagacccaaggggacacgttatttctgatcactctcgactcctcaggcagacctgactgcccacaacagcaggaacagaagggcccggtgccagcatagacaggctctgctgtgtgagtttgctatcagggtttgggggccttgtgggggatcaagatctttggggaggctcagctttacccatccttgcaaaaggtggctggaccaggcagccctagcccctggaccacccaactccctgaaccaacaccaggggtctaattgctccctaagcccccagtatcaaggtcagggcagtggtgggggtggggagagcatagatgacaaagcccaaggggcccctgccccgagtcactccccaataaaatgggtccccccaacctctgtgttttctgtgaggaacctcatggcccccaagggctgcccacagaccccctcctttgtccccaggagacacaggtgctcccaggatcctcctacagtgccacctctggaaatccctgttctctgatcaaacagagaccactgagggggtgaaaaggagacagacagagagctgctgctttttacaataaactctatattgtgcacatgaagacctggagatgtgccgacttcctgtccccaaagccaatcttccccgccaaggcgactgaggatttcaagggctcagaattactgcaggaatccaggtgacaccagggagagaggggggaggaggggaatcggaggggatgggtttaaaaggcagaggggagggagatggaagggaatgaggaggagggagactgagggggctgcctttccttggggactggggaactcatgccctgcccccacccgcagggctccaggggtgagagaaaggggtggagaataaagaattgggcagcagggtgatggggggaacagcagctggggtatttagggctgggggagtcgggggcagaaccgatgaatggacgggctcagaaggggagaagatacaaggaatgagagcaagagaaacggggaactgggcaacagggtgaccgagggaacagcacccggggtatcctaagacacagaggctatctataccttgctagagatcggaagagcacacgtctgaactccagtcacgagagtac

SEQ ID NO: 175 - DNA, 1644 bp, synthetic construct
  misc_feature 1..1644: note = Description of Artificial Sequence: Synthetic polynucleotide
  source 1..1644: mol_type = other DNA
tgcagggataaacaggaagagaaaatggccttatctggggcaatggccagcaaatgtcacataagctaatgcaagattaaattagacatatttattacattgtttaaaattgagtataataaataagttattgtttaaattctcagagaacatacaactgagagattcctattgctattgaaaacttttctcccaggattgaggacacattacaaaaagctcttccctgtagctcccaagatggttctgtgctggaaagaaaaacagcaactgcagctgaaatgcatccagacccacctccactgtcaccactacattgctaaagaattaacatgcaggggcaaagccactaacacctttgtgttactggtactggaggaactcatagaaactgggatagaagaaagaaaagctccaaagccctgttcattctctcaggaataacagcctcatctcccacctcctctctctttcttcaggaataaaagcctcatcctgctgggaagggcagaaaagaggaagctgaagacatcagtgggaagacatagtatagtggctgctggaagaagatctgggaaaaaacaaggagaccctctacccaggaatgggaggaagatgcatggatcagcatcacacctgcaggagggcagggatacttggaaggacacaacctgagccaggactgtgatgtctgcctgcagtatggctccctcagaaggacagagagtgcccgttcagtgcgacccttcccaccacattgacaattgtccggtccatgtggctttagaatgacctgggggatttgaaagacagagtctctctggatagcacaagactaaagcccaaagccaagcaggaaacaaaattaaggtgttactggaggaatctgggtgtctggtggctacagaggaaatgtacttcaattctggcagccactgcaataaggactttcaaatgtagtcctgagtagtttcacacaattttctacaataaaggcctagaaaagatatggtgttatcatctacaaaaaatgcaaaaaatcataaaacaaataattagctgatataataaatctgatagaagtatctgcagaacataaatatcaaaataacttgcataaatacattaaaacatttacacttgatcccattgttagtctatgcctaacttcataagaaattgccaatatgtggtatacccaatactattataactaatactatattgattttatgcttgtaacaaagagcacagagtaggttctgtaagaactattaatgaaaaagtcaactttgcaaaatatttagatttattcgagccaaatgtgaggaccatgccctgtgacacagccccagaagatcttgagaacgtgtgcccaaagtggcttgattgcagcttaaatttaatgtcttagagagaaagacatcagtcaatacatatgagacatgtgtcgatttgtttcataaagataaaagagctacaagtgaggcagtgtggggaggggattacagcttacaggtgaattcaaagattttctgattgaaagacttaactttttatttaaagagctgaaatcagtagaaaaacgtttctgtgtttgaagggggccagcccctccacaactgtgggtatttctcgtcaggt

SEQ ID NO: 176 - DNA, 1640 bp, synthetic construct
  misc_feature 1..1640: note = Description of Artificial Sequence: Synthetic polynucleotide
  source 1..1640: mol_type = other DNA
taacaatcttcctggtgatgtcagtgctgccagtccaagcaccacatttcatgtagcaatgctctatgcagcaggaaaaccaagatttgagttcagacccataatgagcattgataactggtagttcatgtcattgaagcagccaaacgcatgaagaaatattaagacagtccaggtaggggaagagacacttgtttcttttttctcccttctctctaaaccaaccttggaggagttggtcttaaaagtggggagtggcggggttgggggataggaagagatgattcagatgaagatcatgtcttacctttacttgactatgccaacgagtcagggtcccagctcaaggctgtactgtggcaattcgctggcagcacatgaaaccctgatggaattcaactctattaaacttttaaatactgaaagtgatagaattgcccaaaataacatcaaagcacaagaagattatacagaatattactaaaagcagtgattagaaaaaaattatttcgtatttatgcttttcaatcttaaaactattcaaaaatgtcattatatatatatacatttgccttgagaaaatatttcaactgcatttcaaagttggtatgaaaatgaagcacattataaaattatttttaaatgttaccaaaaagctgtgtttatgcaactcaaaattaaaaacatcctgtttagaataaaacacacatgtgcacacacacattttataatggagtcaagtcagcatttttatgattggcatctcttatctgtttaaggttgatcactttatgtataatgtgtttacttttttaatacaaacttattcagcttgcaagttattgagagatgtggtgaaatctaggtaatggaaaacatacaatgtaaggctgattaactctaaagagaagaattattttgtgacactgcataggcaacaggattggataattttgtggatgcataaattgaattacaattattgccaaaggcagcagcaccattagaaagcacatcaaaaaagtaaccaaaccagacacactgccagcgtttttaatgggtgtatcaattgtccctgaagatgttgctgaaaaataacttggtgagaatctctttctgctgtgcttcagaaaagggaactagaaatacacgtattccgttgacttagaaaactgtgcatatttttggatgttaagtgagccagctcatgcaaacatgcagacaagcatgtgcacacatgtgtgcgcacataaagcaagtttattgtgcttatctttttgacattcagagtggaatatttgtccatcagccttcagccagaaagctatattccctaaaaaaatacccatagagaacgtagcttctctatcctaattctgacattcgaaatccttttaaaactttcccatatgaaaaagagaaaaggtaactactgttttgttaagatgaatctactcctactcttgctcaactttagttccatctcttctaagaggttttttttttttgccatttcagtataaaatgatctatttatttatcattttcactcgtttgtcatctatctatcatctatatatctatgtatctatctatgtatctatgtatctatctatgtatctatgtatctatctatgtat

SEQ ID NO: 177 - DNA, 1640 bp, synthetic construct
  misc_feature 1..1640: note = Description of Artificial Sequence: Synthetic polynucleotide
  source 1..1640: mol_type = other DNA
gggttcaaagcctcagggaggaggggctatattctcaagagtagaagaacaggaccagacccaggctcaggaatctctcaccagggcctgcggttggccacaaggaagccaaggcagtgggaaaatgactccctggtgctgaggatcagctgaaacagtgacttctcaccagagggctgcgatgagcaagcagctgacaggtcaatctcggcagacagaccaatggccggagccggtcttacaggtcttgagcaaaatggtttgggtggcctccctggctggagcatttctgagaccctcagagatgaattgtgctgagctcaccattttcacatttggttgctttctggagaacagatgtgagtgtcctggaggcctgagacataccaggggaccctcggctcctgatagaacagaacagatccaagcctgaagcaagtgtctgaggactcgtagtgggatgctcccgctccactcaaagatcgatatcggggtatatccccaccaccacatacactcacaggtcccgggtacagacctcactgccctcagggaagccccacccctcctgagacactgggacattctcttctccccattcattctcctcccagctgtgttgtgaagaaagaggacttggcagagcaggaatgcgttctggctagtctgaggattgctagagtgtgccaagctcagatccatgtgccagggaccaacggtgagtgtgtggtgctccatgggagcagggagcatgtgggtgctccatgggagaagcagcagcactcttctatccgagcttcgtgggaatcctcccatgagcaggcagggcagcccctccctcaatgccagacctggacaggtataaataatggagccgctcctggtggggagccaggcaccagcaccactgcagctcgggagagtcccaccccagcctggaatttcactgtggcaggaagggagggattgtgttaggctcaccagggagctttcctgctgggcaccccacagaggcagttcccaggcttggtgggacatgttgctcagcttctcctctgggtgctgctttccttgtcagcagaagacagtgcagggcccgccctgctgctctccccatcagagaaaggacagtaagctggctgccctgacctctctcgcagagctgtgcagggaatgtaggacctggtcagcatttcatacatggagaagcccttcacagacaccagggagagggtggtatccattcgtggaacaagggttaggcaaatcctgccatcccagcccaggattccttctcctcagagcctccactccaatctgtagggctttagtagaagatacatttaatagagcatgataaatagaacatgttccataaaacagcatttgtacatatcctctaagtcccccccagcagggcagtctccaaggttagggaacatctctgcatggcccacaccctcagcccagccttgggcactggaagtgttctgcagatattttttggagtgaattgacagacagaaaatcctcttcctccgctccttccccagattgttatgtgaagcccacaatggcaagaacctcaattgcttttgcaccaacctatatctacaccaacctatgtataacagaatgta

SEQ ID NO: 178 - DNA, 1635 bp, synthetic construct
  misc_feature 1..1635: note = Description of Artificial Sequence: Synthetic polynucleotide
  source 1..1635: mol_type = other DNA
tgcagagccttccttgttcattccacatttatggttgaaacttctgtttctttgtctcttgagtggggaaggggccattcctagtgaggcttcctgttttggtacccctttcctgagtccaaacaggaagaatgtttgtgaatattccagatgggccatgtccccttatcaattggagccccaattagggtttgcatccagaatggttccttcaggtttggggtatttggatttgtttcatggagacaccaagactctggatcttctttggtctgcagccagaagcatatttaggagagactacacatctgctcaggtacactggtgggtagcacagatagacacatagagagcagtcattttctggggatccattctataaagtggggtggagtttttccgtttcacaagttagatgttgaaaattggctggatgtccagtaatgtctgacaggttgcccactcgcatccaagccacccatggccgtccttgtaaatggtaattcccttgctccggccatggcacttccttgctaaatcgtgttccctgtcaagcactggagggagaggccatctctgttctctcattatactgaggtggcagagtagctccctcttattggtctgatgcctcacttggtagcatcaaggcaatccgggccaacgcagaggccggcgctaagggccccatatggcggtaccgcagtgggagctgttggggtggagcagaggccaggtgcgttctggctgtggtggttggagctgctaaaacagcttgggtgtaggacatttaaaagtcctaattcttcttcattgctttctgcctgagtttggctatctggcttgtgaagagtcctttttccattctgtcccttggtacagctggcagctggcatcttccctcatggtatgaatcctgattttcaaaaagcatgaaggcttggacatatggtattttttctaattttccagacctctgacaaaatgagtctaactgcattaaagactagtattggttgcgtccgttcagaggtcaaaatttataacctaacttgtccacagtccaaacagcactgcaataatggaccgtttttctcttagtcaagggctcatagctataggctctacagttagctagggtatgccccaggggcctcccagaggtgatagagaccttgtttcccctcctgacttggtttctatacccatactgctcattcctgttgaaacagtgatgacaacttttatttgttgtctgtcttctgttctacactgctcatatccttcaaccagagctctatgggttggaaagacttttctagcttcttataagcagtgcaattagtaccactcatggtcctaaaaggagcacttgtgcaaatctcaccacacagctgggacagccaaagagatcagagaataaactccttgggcagctagtggttagcaccagctagcacagcactcccccaccaccgccccgccatgccccgaccggccccaacagcacatcaacttcatcccaggtccatgttctgctgtacttagtaccctagtagagggtaaccgaatggcaacaaattaaatggtaaattaggcacacaaaaagggcagagggggcgctctgtgtgcagc

SEQ ID NO: 179 - DNA, 1634 bp, synthetic construct
  misc_feature 1..1634: note = Description of Artificial Sequence: Synthetic polynucleotide
  source 1..1634: mol_type = other DNA
atatagagacattttgcaagttaataacaacgtgacagacaatccaataaataaaatgataggtactttattgagagagttaaatcaatggtaaataagcacataagatgtttgacaccatttttgtcattagaaaattaatattgaaactgcaatgacatttgaatatacatctattataaagacttaaaatggttatataattgcttaaataaacaaatgagaaatatgacaacgtcaaatgttggcaaggatgaggaacaacagaaacactcataccttcctactaaaaattcaatatgttaataatagtcattaaaaaaattcagcaattttttatcaagttaaaatatgctttccatgtgactcagcaatcccactcctaggtctttacccaagaaatgtaaatgtatgtcacaagaagacatgtgtttttgtttgtaacttacacctgttaaataatgctaatggaacttcattcataatggccccaaaccacaaataactcacatgcccatcaattggtgaatgttccaaaagtttataatatatattcacagaatagagtattacttagtaataaaaagaatgagttactaatacacgctaaaacattaatacattttaaatatgttgtactaaatgaaagatgctagacagaaaagactgcgcactacatgcctccatttatatgaaaccacgagagcaggcagatcaatgtttgctggggcaagatgctagcaaaaacgtttgcaaattggaatctcagcatttttcatgggtgatggaaatgtttactatcatgactgtggtggtagttacactgctatttgttaaaacttattcaactctacatttggcaatttgtattgtatataaattatctcaaagctaatttcaacagataaaagagagatacaatatgcaaactttaacaaaactatgtattactctgttttatttttcttttcctctgcctgaaatataggagacctatgtcttcctccttccttatcgatgcctaatactacaaaatatatggcttgcaaaatcagatcaaacatctgcattttctattctataagagtctagtagcttagaatatttgttagaactgccttcaaaggcatgctaagcattattttcaaaacatgtaaagaatcctatcattttaaaacatggctacagaggttttcaaataaatagaaacataaacctctgctatactgccataatttgactatagagttgctcatcctgataaaaaaagatacgaagagttttagccaatatatttttgctaaccaaatattcagctcatatcaagacgaagtcactaatttattcatatatttatttttaaaaagcaagtagtagaacacactaccaaatatatttttttcagaagaacataaagttgaatatcacagagacaagccatcatatttgagatggtaatcaaaaagaaattggagttgttatgtgtacaaatttgagagaatcactcaagtaaaagttaaaagttaataatatattttctttctttctttctttccttccttccttccttccttccttctttctttcttttttttgagacagagtctcactttgtcacccaggctggggtgcag

SEQ ID NO: 180 - DNA, 1630 bp, synthetic construct
  misc_feature 1..1630: note = Description of Artificial Sequence: Synthetic polynucleotide
  source 1..1630: mol_type = other DNA
gcgctctgtgtgcagcagttatcaatttatggaaaatcatggcacaaatagaagatagaaaaaataaattgttaaatgacaatacaaaaagtctttctctaactgtcaaaatgccatataattagatggatgcactaatataacaaacagaaactaatgaaggaggagtaatcagcagtgataaaagggtagacagagggcagtggaattgaacagaggaagaggggggtgaaatgaaggcaagaaagtaaggaaaacatgagtatttatttaaagtgagtagttggaggctaaaagggaagttgcaccaagtttgggtctaacatgttgtggtagtaactgtgttcttcatattataggtaaagaagtcattgactacttttaaatagggagattaggtggtcagtgtagagttgctgggtgagcagaatgcataaatgtgcctgattaactaaagatggcaaggattatggatattcaaatagcctttcccacctctgttgatgaattggtagtaacctacatcctgttggtaagtagtcagtctagctaggaatgggctatccaataaatattgtgagaggaaaatggaaagtagttagatattacatttgaagaaaaattaataatttgaaatgcctctagggagcttgtaaaattggtaggatgacagtaacattaaacagaaggaaaagaaggcaaatgggaaataaagttttgagagtacgtttctaaacttagtgaattaaattgagggttattaaagaggaaatttgagccagctgattacaaacacataatcaaagcttctgagcagtcacaaaatgagataaaggtttcagtgttttcacgaaaaactgatatactaattcctgtgagtaaatgagatcttcaagaaagagaatgtaaaaattgaagaacttaggacatgttgttcaatcttagggaatagacatttgaaagaaaaggaaggaacatgaggaatgaagggaacaaatgagaaacatgtgcctgctatcaacttagagttggtgaagcaaattggtaaacattggcgaattttatggggttattgatgacccaaactctaagcttctttgtaaattgggaatttttcaaaataaaatgttctgggagatggtaaaacaaatgtggagaaagcaagtccagagtgcagagctcaagctaaaaaaaaagcatttgattttgtgtttgagaagataacacttgatatttaagattttcatgcctttaaagtgaagttgcaggcattgcattgaaaaaggtttatgcagctatagcattgacgtatagagttagaagttaaattgaaaaataaagttcgaagtgaaaataatttatgccatccgtcataatattaacttggttttaatatttttttcctctggtttttcaaaaagttgtggaaattgacgaagtataattattctaagatggaataattaaaatggcattttaataagcaaatgtttaaatatctgcggaaaaaagggaaatggaaaaaagattcagtaaatgttagctacataataaagtgtatactgcccaattatttgtcatgtctgcctatctatctatctatctatctatctatctatctatctatcta

SEQ ID NO: 181 - DNA, 1628 bp, synthetic construct
  misc_feature 1..1628: note = Description of Artificial Sequence: Synthetic polynucleotide
  source 1..1628: mol_type = other DNA
agcaggcagaacatggaggggcagctcaggatcggggaagggtctcaaccactagagtgttttggacaggaatggctgtgactgtgagggctgaaataaggggcacagttgaaagaaaaagcaaagggacaaactgcaaagccaaggttatcaaaggggaaagaagagcatccctcgggagggagcaggggtgggttgcaggcactgggccatggtcatgtggcaggcccagtgatgcacagatggagacagtgactgcttgcatccttcacagatgggtcttccttctgttcatgatgcagaaagcactctggctgggttacatctacagctcgatcactgtccagccacaaaaccaccagcaagtcaccagagccctctagacctcaatttccctatgtgcaaaatgaggttagagtaggaggcctctaaggcaccttctggctctaacatcctgtgtccagccaggccagccattggacactgaactaattcaaccatggtcacagaggcaagacccttggggaccagtggaaataggccaaggaaaagtcttttcccagcccaaagtctccagtcatctcagtcacacagtcactcaccgcaggggcctcagggagaacaagactaagaacaaaagccccagctactaagaagcaacccaggatgaatgcaagactcctgtgttcagaagtagcagttctaacccgggctggaaaatacacagtatgttatgagaacattatgaataaccccttgaccagcaattctacccctaggtaaatcctagagaaaatcacatggatgcacaaggaaatacaacaagaatgtgcatgctggcattgtctgcaactcaaaaaacctggatattacctaaatgtggaccaaccagagaactaataaataattgcagtacatccatacaacggaatactacccagcagtgaaaatggacaggcgagagccatgataccagcatggatggatctcacatcattacactcactcattctctcaacaatcactcacaaacacaagtcctctgtgccaaggtgttgttctaggcagcagggacactcaatttaatagatgatgcccctgccctagtgggggtagagagaaaagaaaccaccattaagtaacacacatagcctgacagactatgttgagccctacagagaagcatcaggcaaggagaagccaggtggggagaaggtgctattaattgtttaagcagtggtcaggaaaggccaaatcacgtactggtcatgcttcttattttaagctgagtggtgggtgcacaaggattcactttattactctttataccgttttctaagtctgatatgtttcaaaatgattttcattacaaacacgactgataagggaagtcattaacagatgagagtatacatagtcttccacctcgaatgtaaatgtatcccatgttcataagcctgattcatgtgttcccaccccccatgaccaaaccccctaccttggaaggctggtccctctcaagcaaggttttcaacattgagcagtgttcctggaaccctcacagagcctgtcgctaccaagcccggcagggaaccttgtcagagatctgactttcgatgctgaacgat

SEQ ID NO: 182 - DNA, 1625 bp, synthetic construct
  misc_feature 1..1625: note = Description of Artificial Sequence: Synthetic polynucleotide
  source 1..1625: mol_type = other DNA
gcgctctgtgtgcagctaaagacaagaattttaccctgttctttctttgttctttagtgctctctcctttttgatatttagcctctagtttttgggctagttttcacaaaggaagggcctcacactgagaaacaaagtactttagatggtatttgaaaacactatccttcctcacatggtcttcaaatgaaatgtttgatattatgttataaaacagttcctcatatttccctttgtatgcagcagagttatagtcagtgccccagggcccttataaaaggaggtgtgcccaggcccctcagcaagctttaggtaccgggtgcaggtgactgtgggcactgtgtgcttgctgcacagaagaatgtggttgagtcatggggctgggaatcctgtatgtgcagggaaatgtgctggtctccttttttaagcctggctgtgaatcttccactgatcttctctctcacagttgatagcatttgtatcagggaaatgaggccttcctcaggatcctgcctgaaccactgaagaaatctgaagggctgtctctgtaactgcagttcagtgtgacgctgtcaccttccttgactttcagggaagaagcattctgttccactggcagttgtccatttgaccctgcttaggaggaatgaaacattttcatatatatagtgtgtttgttcatcagtttcattatttgttttacattcctgagactagacccaagattgtcccagggatctttctaaatttcaatgccctggccgcccctacttgattcctcccctcctcatgactcccctgactcacaggtcagctgcacacagaggagcagcgggagagtgctcagtggagtttccattctttccttttcctggagcctctgtggattcagtttggagacctagatttggccgtgttcactgggcctagttcactgttctagagtcttctggttctgttggttgggtagcctttggggaatcttcattgtttttacggacaatcaaaacctcactgttacatcacacacatcattgaatgccctcctcctgctgttcccttccccttgttctagtttctggcagtgcctctgtcaaaggaagccctgcccccaggtggtctgaactcaaaaaaattgttttttcatttcccccttaatataaagtaactcattatgttgaaatgaaaggtagacagaacatacagagaggtgaggagcaaacaaaaaagaaagaaagcaaacagtgttaaaaggaaagtttctccagttatgactgtctgaaaatcctttacacctgaaactccctcactcccctcacctttaaagaaatatgcaggctctttgcctctatggcactgtagtacattctgaggggggtaggaataggttgagagaagatctaattatttcccttaattgattatttttctaccagagctgtattatatgtctcaatctcagcagctttaaataagctaaaagagttagaccttttccaaattctcgttaaaaagacaaaggaggaaaatgtagtatcctttcttttaggatgttttcaggtgtgagaaagcagtctagtaactggctaactctgagcatgctagtgcttttgcaaatatccaag

SEQ ID NO: 183 - DNA, 1614 bp, synthetic construct
  misc_feature 1..1614: note = Description of Artificial Sequence: Synthetic polynucleotide
  source 1..1614: mol_type = other DNA
tacagctaattttttgtttatatgaacaaatattgatgagccacattgcaaaataacaaagaacttctggtgtgggtgtttagcatagtctcatttgataggaaaactgtgttggtggcacggattctgttatgtccctatgatggccatcagtggtccatagaggttatgaatgcactgggttagggttgtcatgagcatgtggatgaaacaaatgcttatggttcctcactggaaaaccccactgcaaattaatcttcaaaattggttcctgtttccaatactgcaggaattccagccttccgagttttattacaagacaatagatagagtgagcaggggcacacatttccgtaaggaagttgtgatgccctgtatttcagctctacaggtaggagccctataagagttcacattgtctgaatctgatgattttgcaatcttttctaacaatgttgtccaacttagctactgcctcttctagtctttggcgtttgctttcaaattctgcttgtccatctgttatttgtcctctggcattgttgcctgcccattttttcatgtttttctgggttttttttcctgtcttcccagtgattttgcaatatgagcctactgtttgatttttctatcttgctccctttttgaggacaggctatgagaaattctagaactggagagaagtgtagggtcttatttctctggtggcgtatgtctgcatccaaagtgcgtgtttacagaaacacagggtataaagctctatgcttataaagccacaaagttaatgtggactgttttcccagaaaatttgacatcacaatgagttgaaacttttattgtcatcaatatgggtctgttatagaaacggccaatgtgttttcttgtttttaagtaaatataaaaacaatattgctgaatgcctctttaggttttgcctcaagttatctctccctgctcttagagaacatgtgtaaaaaaagcaacctgggaaacactgactaagccatagggtgagtgggggagatcctcaatgcatgcccctcaatgcttcctgagcaccaggcactgtgcttgatcttccgcatgtatcatcctaatgataatctttataatacatggggccacaatatttacacctttgacaaaatcaagactgaaagagccaaattaaggataacaggataatgttattcccattttattaagtaacttttctaaggccatgcgtaagaaagatattaacacagcattttaagttgagagctgttctccccttataaggagaaaatttttgctgatattatggtctgaattgtatatgcccccatccccaaaaaaagcctgtgttgaagtactaagtcccagtacctcagactgtgaccatatttggagatagggtctttaagggggttattaagttaaaatgaagtcattggggtgggccttaatgcagtatcactgattttcttattaaaaaggacacagaaacacacagaggaagacgatctgaagacacagggagaagacagctatctgaggccaggagaggggctgcagaaggtaccagccctaccggcaccttgatcttggacttccggcctccagaactgtgag

SEQ ID NO: 184 - DNA, 1612 bp, synthetic construct
  misc_feature 1..1612: note = Description of Artificial Sequence: Synthetic polynucleotide
  source 1..1612: mol_type = other DNA
gcaatttccaccttaacctccctcctctcatgcctcattacaacatcgctaacatcaagtccaacattctaatattacaagtggaaaaaaaaaatgatctgagactgtgaactgtgagaactgtcgactgtggtaaattttaagcatgttataattctaggcctgaaaactaagagataacaaaagaaatgtaatccacagatgcccccttctttatgctgcctacctgcctttgtactctttctcccaaagtcatcttctgcatatccttttagaaacttgtgtcccattttcattttcccaatccatccacaatggcagcgaagcgctctaccatccttctacctgcacacccttcagtagaggtaaacctcttaaggagagggaggcaccagattagaatctacttcctcactgcccggtctgtcttccttggaaaaggaaaagggaagtagatattgaataagcgtaccattttacctacaaggcacacagtaagtggttgatccaatcaacacaatgccaggttgaacattatacacaagtcattttattcttgtgcagatgtttttataggaaagagccccagaaatggggttgcaagtcaaataataaatccacatgtaattaggttaaatattttcagatctccctccatatgcgctataccactttgcattctccctagaaatatatgagtgcctttgttttctcccaactttgcaatgaagtatgattttaagctgctggattgttttaatctcatgaaagagaaattgtttcttagtgtgatttgaatttgcattattataactgaggtgatcatatgtttaagggccatctgtattctcccttaaatttctgcatttggcagaaggcattttgtaatccaaagagctatttctttaccttcaagtcacactccgtgcacagcccacccatctgctgacctatgtaagaggtcaatgctgcttacacgtgttttgggactaaatgggggtggttgtggcatttgtgtcaatggagcaaaggacctagaaggcatcataattcacacagtcagtctttagttgatggcttggcagaagctgaatgaagtgtgtgaaggtgactctacagagcacagtagtaaggaggggttgcttcttctgtaagtttacatctcatgctattttgggatattgcctggatgacttgtcttctcctctaacatataatattcagagtgttttaagttgtataaatcttaagaaaagaaaaagggagaaaagaaagggaaatgctaggaaaaagttctcacatttgacaatgtgatttatagaactatttctaggcacatcttattacatcaaagtggcagtgtttatttttttacaaatgtgtaataataaggatcttgacaatgcacccctccctttcagattacctctagaaatatccctggaaaactttaagatgaggcaattgtggcataaagaacaggcatagagaaatgctttttgaagagtgtttgacataaaatttctattaactgttaataagcactttaaaaattgttctgttctcaaatacgtatgggaaatgccggatgaaataaagataagcaagctct

SEQ ID NO: 185 - DNA, 1612 bp, synthetic construct
  misc_feature 1..1612: note = Description of Artificial Sequence: Synthetic polynucleotide
  source 1..1612: mol_type = other DNA
ttactgggtcccttagacagacctcaagggagatcttcccgaaacagcatcccctgtcagctggaagcagttaaggttggcctttgtctgtattctaacggcagttagatgcacttattcaaagaggaaaatgatagagggaggaggcagataactctcctaggcagacaggggagagtccccatagaatgtccaacccaccaaggtcattgtgcacagggggcttgcctagacatgcctgcagtgaaaattgttagtattgtatcttatcactctgataaaatagccacacataataatccagctgcgtgaagataaaaaataactagtttgaatttagagcaagtcccaagtaaatcaaagttagcatgtggttcataatgtgatagacaggagacatggctgaatatgaagaatgtgttcacatctattttgtgtcgagatcaggaaaatattttgtatattacttaggtaagattcccactgagatcattgatttaagattatatattgatggataatacctcaataataaaagtagaggttattaatcagtaatttgtattactagtacaaacttccatttagtatatattattctgtgtgttatgaaatcaattcagaaggcagaaaactttgcacttatcacaactttttaataaattaaaaattagaattaagtaactatgtttctagatggtgcacaactttggaatatttttgcaaacagagagggttcttacatcttctggaaatcctatcaaaatggacaacaatggaagaaactttcagatgaatttctaccaactagagatctgattaatagaattttaaagcaaatgctaacacacaaacaaaaaactaacatagaagctaaaaaaatagtgatttaacacaccaaacactctacctcattctagtttataacataatctaaccgtggagggcactgtcattgttcatacgagacagaatcaataccactcacaatcttctgggaatgtttaaaaaatgtcatctttacattaaaattatcaaatctttaataaaatgtaataaaatgtaaaacttgcttggccaagggttctcccactagcactatgaaaccatggtccactcctcaggctgcatcagttattaccctatgacttggcagctaaaaggcctatatgtttatagactctaccccagagatcatccttgtcctactgcttgcatgtgtggtacccactccaaccacgaagagtttgaggcggcctttttactacctcttttccacaggctcttgtgatcttcaacaaggaaactggaaggaacatcagtggacaatactgctcttgaatcatattggaaggaatcttgtcagatccttttaactaactcactgcagaaaacattcaggaagttaattattgggttcgtattttacaattaaagaatcaattcaggccagatgcactggatcatctgtataatcacaccactttcagaagggaagtgagggaaatcccatgagaccaggcaatcaaaaccagcctgggcaacacaaagagaccttatttatatgaaaaaataaaataaaaaataaggaggggggctgcacacagagcgc

SEQ ID NO: 186 - DNA, 1611 bp, synthetic construct
  misc_feature 1..1611: note = Description of Artificial Sequence: Synthetic polynucleotide
  source 1..1611: mol_type = other DNA
atgttctcatacctgaggcaggtttcattcatcctttacactgtttctaattctacaccttctcccagtttctcaatgtgctgggtccagataaacctacctgtttatgcccaaatgaacattttgcatagatttctagtcaccctctccaattgcttttttgtaactttcgctactgtaaaagttaccactgtcttattataatcgtgtgattacctttcaacttctcccagtaggctatgagcttctgaaagcaaggttctgtttctcatttatttttaaatgtatttgctagtcaacaaatgtttggttagtgagtggatgaacaacaattgaaaccaagactgtgcattaaggcctcttaatcattgttttgaatttgagagatggctgcatatggggtgattaacaattatgtagagcctcacctctgcccaatatttctagtgattctatttaaactatgattggaataaaggtttgatgtgcagtttgatgtgcagcaacaaagaaagtaggaatagattttttcatattcaatcattcttcaatatgaatctgcctaaattactgcatactagatatatcatacattctttcagatcaattatagtttactgactaaacctctggccagaaacttaagagttcatagcaggtttgtcttgtttttctgagtcctcctaataacagacattgagaaacagagaactggtattatttttatgaattctgggaaagacaataccattttgcagttttctgcctaaaataatttatttcaatatgaagcggtaatattcgtacttgaaatatccattaaggcgtcagtctatccccattggtagtggagagtgaattacaatgaaaacttataacaaatggaaaattgtctttagtaaatgtattctatgtagttatccagacagttctgagaaaacagaatatcaattattcaacacaaatacatggtacctaaaatattggaaaatctgtaaagttttggtcagattcagctagcagtgtggtagctgctctacaaggaatgactgaattcgtctatagcatattggtaaataatgaaggaagaataacgactttagtgaacttgaatcactcatttgaacaacagatcctagactatacagatatagatgacaaatatatccttgtagtggttttaacactaacatctctttaagaagatctaagggcattctctcagaagatattgttaactcaaaaccctcaagctttcacataatcagaattgagttattatttttgttgcctctctagatcactggggttttttttttttgaaattttataaatagtgaaagggatttctcatcctgctatggtttggatgtacatgctcctgtaaaatttatatgttgaaacttaagccctgaggtgatggaaggtagacactttgggaggtggtaggtgatgagggctctgctttcattaatgggattaatgcccttataaaaggggccttaaagacttcccaaatcttccagctccttctccaagtgagaatatcaatatggaaccatctatgagaaacgaaccctcaccagacaccaaatttgccagcaccttaat

SEQ ID NO: 187 - DNA, 1605 bp, synthetic construct
  misc_feature 1..1605: note = Description of Artificial Sequence: Synthetic polynucleotide
  source 1..1605: mol_type = other DNA
gctgcacacagagcgccaacagattaaacagattagcccgtgagctgtgaccagaggctacacctgatcctacagaacccaagagatccagtcagcaccatgtcacaacccatgctccatacatgagcttttcaagatataattgtagggcagactgcagtagtggattcatgtgcccatgtccctgggtaaggctctttcttctctggattttgaaagttccttctacaagatgtagatgcctcatccatcctgtttactaagatcatagcaatttccctcctctgggaggaatcaccttccttcctttgtgttttgccagacactgaggaatgaaagccttcagcaaaagtattaccttgcttgggtttcaattgtaagaatttgggagaaatcagccagacctgaaatgtcttcacatttcatggatttccagtgttgccaacttgtctcggtacaatccagcagttcagagtgcgggagactctattacgtgtgacctagtgactcaagatccttccatcatttgaatctatcatcttcagcaatggctgtgtgaatctcagagtgacctggggatagtttccgaaccacctagccatcttcagatttggggctgcatttggggagggagcaattttattttctttctttcagtcacagtccccagtcccttttggcctacacttgagactttgctataaacaactccattcacttttttgccacgaacaactccattctgctttttccttggaaagaaaagggctcttcttttgtttgtaatatactttatattttaaatccataactattttaaaaaattaaaaaacaaaaacattgttcaggccaaagaaacagcactataagacaactgccaatcagcaacttctgctgaagaggttctagatgagggaatggaggatcagaaatcttcatgacttcagtaagtctggcatagtttctgtgacctcagtgtccaaatgatagttcaataatacagcgatttctgatttgagatgtctgatctgattgtgcagaaattaagagcttagacttgatggctgggaggacctttccagagtcttagttgtaggtcccaatgtgtctttgctcccttatttctaacataagggtataaatatatatgtcttagggttatggtgagggtgaaatgggatagcgaatgaaaaccactatccccattcctgcatgtagtaatcacttgataaattgagctattactaaattttagataggaatgaaaatttaaatgtgagctagtgggaaaagaaagtacaggcctaatcagcttcattggataagcatgactaggcactgcatgcttttctccatgggcctaaagaagaaacctctccagttttatagcatgaatcagaaatatgtgcttcggcattattttgcaataaatacaaataaacaaacaagcccatggatttacatagatctttcaaaagaggggtggaataagactgtagctcttgttaacaacattgttaacactgaacatccaagtgcacaagtcatacaggagggtgtctttgtcagttgacaagtgaaacattacacatctcggttcatcca

SEQ ID NO: 188 - DNA, 1604 bp, synthetic construct
  misc_feature 1..1604: note = Description of Artificial Sequence: Synthetic polynucleotide
  source 1..1604: mol_type = other DNA
gcgctctgtgtgcagctcttaagaacttggccaacaggtttattgttataatccagattaatcatttgtgtcacaattgttctgtgcttgccaaattccttttcccccaggagttaattctcaggatgtgtatgtccactggacataatcaaaggtttgatacatgaggtatgagaatgctttctgtctcctctatcagacataacaattgcattcatgggcacttggagttctcacagtgctttcatgtgcttgtgcttgtcacctcaacctctgaggtaggcagaggacatattttcattcccattttgcaaaggaggaaagagaatctcagtggttatgtaatgagtgacttgtccaggtcacacactgcataggagctcagagctcttcgcttacgattttctcatctccctggctcaagcctagttgctagtgtgcatttctggtgctcaagatggcaagattaggcttacaccgtgagtgcacagaaaggtaagaaagtgctagtgcgaattaatttttgatgtgcaaaaaaaaaaagaagttttaagtttctccatgtgcattatttactttatttagtcggagaagaaaataaaaatattaatgaataaaaatgctaccttttattaataaatgactaacaaaacactaattgcttgtagagatgctgagttctttatgaaatatatcccaagttttgaccttaaacaaatactgataaagcactttcattatcttcatttggcattgatttcaagtttcagattatttccagtggttttctggaaaacgcagcgtgttcacctctttgctgtcatgttctgtagtgtgtttgcaaattcacagacttggaattagaacctacggaggtcacttagattttcaaagaccttcttatgacatttgaagtattcctagtgttctgcaaataaagtgagaggccttgtagggtgtggctatgcttgtgacctttgttagtacaacttggaagaaaacccaccacacttgtacccaggtagaataagcatttacactttcaaatgacagcttaaaataactgacaaggaaaatttaagtttgcaagttcaaagcccttgagcaactggaaatttacttttcaaaatatagtgtcgatttcaaataattattgtcacaaaaagtcagagcctcttgaagcatatctcagacataaaagaataataaaatttggcagcttttgaacttacaccataaccagttaagataggtccacattagttctaggaatcactgagaaaccatactcaagatttcaactcaaagagaacaggctctttgtacttgctatttatccagaacactaggacatggttttaggcacttattagactgactttctgagatcatctagtagtagatcattgaagtaaatcacatggggaatgattattaagaattgtggtagaaaaaaagaaaagcgtggagactgaaaatctagttggagatgggagtcacaagaaataatacagaggctgcccatccttgtttatatgtatgtttacagtatctaaataactgtgataagtgagtcgtttatttgatctgccatcctactatgc

SEQ ID NO: 189 - DNA, 1604 bp, synthetic construct
  misc_feature 1..1604: note = Description of Artificial Sequence: Synthetic polynucleotide
  source 1..1604: mol_type = other DNA
ctgggcttttctattttctctctccagcccctccgtaggtgatccatccaaggttgtggctttaaatatgacccatatcctcaagacaataatttctttcctatctatcttctaaatctctcctaaacaccaaactttattaaactacatactagacacctccgcattgattgtgtgctatttggattttttaaaaaatttatatataagtgatacctagatcactagctaaatgattaagacattaaattcatgtttacagctccagaaatgaaaactcaaccaatttcctaaagaacagtaacacatcatatcatcaactcataaacatctgaggatagaagtgagtttccaggaactgcacagacaccaaatatataatgacgtgatctgagtctgaaagcattcagtgaggcctgctgtttataatatggcctcactggctcagggtctaaacagaacatatatggaaataaagttttgactccttcctctatactcaatctatctcttcattagtcttctccagctcagtaattggtaaactacatactctattattcaaataaaacccaaagttcatcattaatttattcctttccttgagtccaaacattcaggtcatcaccaagtctttgatacatgtcttcaatgtgctcatttttttctctataactctaattcaagctaccataaccttttttcctaagattattttcacaacttaattggtttccctgcttctaaccttacaccctaaaacccaatgttcacacagtcatcattataaaacataattcagcctacactatttttttttatttacctgcatgggacagtccaatgacttttcaaatactttatctgcatttatgatataattttacatatttcctagactacttgtcctacactcactatactccagaatataggcttcctttctcttcattcaaattgataagctctcctgcctcatgatcttaacatcctgtttccccctggctttctgtgtgattggctcctctcatcattctgttttctatcctaacaccacccccttaccttgcacataaagtaccttatttacccaatttgctctttttaaattgctctctttattctagaaatttttgatacttaaaattaacatattatttggtatataaaacaagaacagtgatttttatgtcttaatcagcatatttccccacctcctaaaacagcatatcagaatatctactgtttaatatatatttgatgaatgaatgaatactctcagggctagagccacactctggaggcctattcccgatcattatgcattttttccatctggttggaatgcactttcctctgtatttagtccccgaatgtacttatcctttcgccctgctcttcactcaattgtggtgagatcttatggagagtctgttaggttggtccttggtctgggattgcagtggcctctatacgatagtttgtttttgccatggaacatagaggagagttggtcatggataattgtacttgggtacaaatttttaaaaaagtacaaaaaaaagcaaaacatctttgctttttgagattttccttcttacttt

SEQ ID NO: 190 - DNA, 1601 bp, synthetic construct
  misc_feature 1..1601: note = Description of Artificial Sequence: Synthetic polynucleotide
  source 1..1601: mol_type = other DNA
gtgaaaagcagaaccagactgtactcagctgacatctgccaatggagggagcatttgtattggccctagcaagaggaaaatctcccatcctagtgttgggagcttgagtttttgcaagtcttgccatcatgagttgacatgctattggactctaagagaacttaaggggcagtctaggccacaaggacttcaattattacccaagtcatacttctagctgggctcagagccagtggaaagtggagggtggggagtatgcggtctactgagacagcagccgaagcagctaagggagtgctcacaacaccactcccccaccacccacccagcagcaatcacacaacacagagaaacctgtgaatttgggagatggagagcacagggactggaggactttacattaaactcagtgctgccatgtcagtaaagacctggcagaattctcacctgctgactaaagaaccactgtacccagaataaaaaacagtgacaaccaggtaatacaccatgggcattgggctctgagaagtgctaacttcaggtgagacccagtgcatttctagccggggtagctatggtgaaagacttctgtttgagaaaagcaggggggaaagtaaagggaactctgcattgcgcctgatataccagctcaaccacagtgggatagagcaccaagcagattcttagagtccctgactccaggcctagggtcttggtcagcatttctgcacttgccctgggccaaaggtcgagtccctggcattgcagtatttatcacaagctaactaaagagtccttgggctttaagtgagaaagtgatgattttgtggaaccctcccatgggccagtagtggtggtagtcatagaaaaggctcttctgcctgcagacaggggaaggaagagtagaaaataatttgtcttattccttaagtgtcaggttagctacagtaaaatagaagagcaggtaaattttgaagattttatgctttaatctgtggctcccaggtagcatctgtggaaccattcatgtctaggggaacttgtcaccctataggcagagacacaaacctggctggctttgccacctattaatcacagagtcctagggctttgaagaaacttatatggtagccaagtagtggttgcagtgggccttgggtgagaccaagttctgtgcctacttcaggtgcaaaccagcacagtctcagtggttgtggccacaggggtgcttatgttaccccaaccccagctccacatgtctcagcacagaaagagagactgctgatttgagagaaagtaagggaagagaacaagagtctctacttgataaatcaagagaatttttcttgatgttaatccaaggccaccaagacattacctctacgtgtttgcataaactactgtgctattgggtttggaacccaagtttctttgaatacctggaaagtgttcctaaagataatgggcactaacaagcccagactgtgaagactacagtaaagactgaactcttcaatgtgtagatacagatgaacatctacaagtatcaaggtcatccaggaaaacatgacctcaccaaagaagccaaataaagcactagg

SEQ ID NO: 191 - DNA, 1600 bp, synthetic construct
  misc_feature 1..1600: note = Description of Artificial Sequence: Synthetic polynucleotide
  source 1..1600: mol_type = other DNA
gcgctctgtgtgcagtcaaatactctctccttttcattcccacttattatagggagacttaaagaattatttgaggttgtttgaataatgagaatgagactaagagcatttattctgtagctgcaacaggcttttcctaattcttaggtctttggtaaatcttttataggaccaagtggcttttaacatttgaagtggtggcttagaatttgaaatacttgcaatattagtaatttatgaaagctatagctgggttagctcttacctaactttttatttaagaatagtaataatcagataaatttcattcatggctcctgctaggtgaatttatattaggctgaaattaaatgggcttaataaggtgaatgccaatatcacataatgagatgttctctttaactaatttctaggatattattagaatactataaaaacatttccagaatccaactttaggaagtaatagcatagaaactgagtatttatttatggactgagtttagactaggtttattaaaatggatataaagatggatacaatatagttccttgccttcaagaagcttgatttgagaggaagaagcagtgcaaagccctatatcatgcctctgataagagaagcattgggtgctggggggcccctaagagagatgcttaaacaaaattgagtaaggaattgagataggaactggtttccgaaaatgtaatttaaaaggagagttggaatttaggtagaactcaagaacttaatctgtacagacagaacacgtataagacattttggcagaatggagtattacttattacagaaaattgcaagggttcagtgtgcttcagggcaattattagagttaaggctaaagaggcaagtgaaagacaaattcaactaagtcagtaataatgtctacttaatttatggttacttacatcatattcgttattagtgcaatgccaacagatatttttgtagttttatggtagtagaaaaatctgtgtcattcctgacatagacaataatgataactccaatgtaatgtctattttgaaggtaataaatgcaattgattagaattattcagacctggattcctgattgtgagggaaggaagaaaagagtaaactaaaatggtttattatctcatctagagaattccagttagctgagtggacttgagggatgatgtcctcttttctgtaagttgtataggggaagtacaatttacttaaaatactgatatccctcagtaaaaattttttaaggttttattagctactgttttggcttctaaatcttagtaagactgtcatatattaacgtgcaatgaaagcaagaagtgtattctgcaaagcataggagacttatatagacttgggcatgcttgtttctatttttacctttgtaaaggtaaaaaatagactccgtgactcctgcttttttctgttgtaacaaaattcagctttctctacatagtggctccaaacaaaatcctagaaatgactaaatactacagaaaatatgtcagattttgtttatctaatgcttataaatatataatatagttacaactgaatgtagtcacattgatgttataccatt

SEQ ID NO: 192 - DNA, 1598 bp, synthetic construct
  misc_feature 1..1598: note = Description of Artificial Sequence: Synthetic polynucleotide
  source 1..1598: mol_type = other DNA
ggatattttggtgacttttaaaatttattataaagacatgttatgtcctaaaggcaaatatgctgactctaatccatagtttccaacttttatctgtatcattttttatgaattaagattgttttctttttctcttaaagaaattgaattcccctacattgtcggtgaatagtgacggatttatacctatgctggccaagttagatgattgtataacatatatctcatctcatgtaagtcagagtatttttgcatgttttaaagaaatccttagattcctattcctgttcctatctttttgtgtttttcaacttttctgtgtttagcagatgttcctattatatcacttcttgtgctgtaaagtgattatttctgtccaagggaaaaatatgtatttgtaacatattaaagaaaagttgtagtgaattcttagtcgttattagcagtggtgtaaaaagtacttttagctcctgcaatagcccctggaatggaacacatcctggctgactcagctttatcccatctaacaggatgagctgtttttaaattgttggtgtcttgacatgcccggtatttctttggaaacagaaagtgttacttggggggaaataaagggacaagccctttgatttaatcaccctctatttctgtttcttcaggatttattgctgtgtttatttcccctaactcctattcttttcctagttgggtcttacatattagccttgaagtctgtggggtgctgaaaatatcttttactaacaactgcaaatatgtatggagctcctactttgtgccaggcacagggggtttgactgtgactaagacagtcacagtatttattcatcttcatggagtttatgatctttatgaaacctgtttttgaactttatatattgctttacataggaacaccttggttttcactaaaagcttgctttttatctgtgttcatttccactttgtaaatctttctcttttccttacagcctaattttaaagattatcccatatatttgctgaagtttaaacagtgtctttctaaagctttgcacctcatgaagacatatactgtgaacacactacagaccctcacaagtcagttactgaaaagggtgagttaactgatctcaacaacaggtttttgttattgttgttgttttgattcattcatcttccataatctttggctgagattagtactttgtaattccaaaaaattttaaccttttgttaagaatatgtactacagctttttatttatagtagggaaaaatgactatgttataaatatcccttgcaaatgttattttcaaataatgtttaatagtgtgagaagtattcagtactatatgatgaataatcagatacaaattatttgtctcttaaaacattccttttctatctttttcatgaaaatattagaaggaaatataccaaaatcataaaagtggctgtgtctgagtggtgggttaatgtgcttttgaagcatattcatattcatatgcaaaattatgcatctcataatgcataatttaaattttcttctttaccctttttttgtatttttcaacttttctatatttagcaaacatttt

SEQ ID NO: 193 - DNA, 1597 bp, synthetic construct
  misc_feature 1..1597: note = Description of Artificial Sequence: Synthetic polynucleotide
  source 1..1597: mol_type = other DNA
gttccagctactcgggaagctgaggtgggaggaatacttgagcctggaagtttcaagtgagctgctatcgcaccattgccctccaacctggcctacagatgagaccccatctcaaaaaataaaataaagaatagcaaaacgagtggaaataaaaaccagcatggaagctgaagtatgagaagtcttcatgatgtagataactctgagcaatttattttggtccacacctctcaaatgtcatgataggtggatcagttaaatactgcacatccctgtgtttgtcaaagctcttagttgcaagctgaaggagttaccactggctgatttaagcaggcaaaaggaatttattgaaaatattgtgtttatttcagattcaccaggataactgaagtactagtttcaagcctagccatgcaccttgttcattgcaacatgacagccctgtagaagtcatgcagtcagaagaaacatactaaacatgctgcacaattggtctggggaagacaccattggcactgcaccaaacacagcattgcatcacaagcccagctggcacccaatactggctgccaccattgttactgcagtttctcatctccctgcagcactgcagctggagagttcctcaagagtcctaaactacaaggaagtctaggaaagtaaggactggacatttttagtgtttgtaataagaggcatctcaagcacctaacaagatgcaaaatgagggcaggggagattccccaccgaaaaaaagattcaggtgatgaggaaccacaacggaaagataaatggattctaccattccatatccaaagcttacagtaaacttactttcaagcactggaattcaccatgaattcccaaaattagaatgcgtactcatgtagctaatgaccttctgtgtccaatcacttttaaattcgaattaaagcaggtaacaaaatattgaagctattgaggttaaatatgtcctcctcaatttctaaattaaatgaaaacatcttgaggaatttttaatgatgaatttccttactcagattgccaaatgacatgatcaacagagaaaagcctggttttgtttctccatcacactgccctattagattgaattagagccatattaactacttgtcaaaatggtaaaagataatcttatttggaagcaatcaaataactagagtttgggtagatataaaatgtcactataataaaggaagtatggaaatcctagaccttgggctatcaaagtctgctacttaaaatagccattcaactaatattttgcctttttccatatcagaaaactggctaatcactgggaatttttttttcctgcttaagaaggaattcctgaaggaatgtatattctatggagggttgaaaggatactgatatgtaaaaaatgattataataattataagatatagcgggtgccctaacagatgtgttatggtttgaattgtattccacccaagattcatgtgctgaaattctaactcctggtgcttcagaatgtgaccttatttggaagtaggaccatagcagatgtcactaattaaattaaaatgagatcttatgcgctctgtgtgcagc

SEQ ID NO: 194 - DNA, 1590 bp, synthetic construct
  misc_feature 1..1590: note = Description of Artificial Sequence: Synthetic polynucleotide
  source 1..1590: mol_type = other DNA
acatgccagatggtctggggcaagacacacccctctctatgaaatgagcagccagtccaaataggtacattagagaagggctgtgggatggacccagctgtagcctggggctacagactggcttccggggtactcaagcagctggcctctggggtagcagccccaggtatgagaggcaggactcagaatctaggccaagcctccataggaatcccctctggagagcccgggcactctgcaggaggggcagcaggcagcaggtgcaccaggagcatgtttcacaaggtgcccaatatcgcatctgctcagataggcagcgagttggaaagtggatgcaataggcagggtggcggctgctccccacagccaggagtccggcccagcacccacctgagtccgcctcagtcctgctcaattgggttatccgtgctcttggccctctggtcccacccacagagggaggtctttggggcgaccaggtgagctggcccttgtgggaggatgtaactgactcctgagcctggcgagccaggcagcccctcgccaacgtccccacccctacctctccagcccccccgcattccctgatcctcccatccgctcccctgacccagcagttgcctctgctcactctcttttcctgctcccaggctcgcctggtcatgtgtccttcactctcctctgagtctccctctttccaagccgcctccactctacttgacacagtctcccttaagacaccagagtacacaagcgcaagtccctgcacctcacctttactcccagacatgggagggagatgacatgaagacccaaacgccacttagcaggagatctggggtatgcagaggggcagaacggaggctgtggaagctccaggggctccctgcaggaggctgcatgtaagctggctattgaatgtggctctgagctgagacctctccttgaagctccagaccaggagccagctgctagctggacccctccatttggtgcctcagagaaaccttgcactccatagatctgactctgaaccccgaatatcccatctcagccctgtctcttcatagggaaagcaccacctctgacccagttctgcaccaaacccacacttgagtgatggggctcctgccctgcactgtgagcactctggataagccagagctgagggggaaagagctctgaatgccaagccaaaacatgagtttcaactccacctccagctctgagagctgtgggtagggaagggcccaagtccagtttgctgtagaaagaccagtctgccactgtatggcacatggatggcacgggcagagtgcaggtggagagaatagtaggtgggcagggtgggggaggcagggacatggctgtagccgtggagatgggaggacagacaggacttggtggccacttatatgaaccaagtgaggggtcaggaagagatacccagttttgtatcagatgtgtagagcgtgggatgctgttcattgattgagggaggaggaggaggaagaggtatggcatgggaggaggtagctgagctctgtcatgaatgtcatttgaagtccccagggagagccaggccggcca

SEQ ID NO: 195 - DNA, 1588 bp, synthetic construct
  misc_feature 1..1588: note = Description of Artificial Sequence: Synthetic polynucleotide
  source 1..1588: mol_type = other DNA
ctcgggaggctgaggcaggagaatcgcttgaatctgggaggcggaggttgcagtgagccgagatcgcgctactgcactccagcctggtgacagagtgagactcctcaaaaaaagaaaatgaaagaaaaagaaagcagcattctgtgtttctgtgggcacgacctgtgggctcatgcgctcaggaggctctagaggcactgacactcatctccgcccatgcctcctctggcctcatggacggtggcaaagtggaaacaattttaatcaaggtctgtatttttaacaaaaaatgtattaatgacttcggattcttaagacttgtgatttttcacctttacactggtgtgaccgcaatatgcactcggtagaacatgaacttcagatttggtgatatgcaatacaatgatcccttcagatgctgggcagtggcgtgagcacagctctcggccaacatatgactgcaggccaaacagctgctactccaggacgctgtggcactggctgattctgcccaactgtaggtgaaagtgagtgctccaagcgcgcttaagcgggctgggctcagctgtgatgcttgctagattgggtggattaaatgcactctcaactcaccttattttcaacatatgatgagtttatcaggatgtaaccccctcaaagttgaggagcacctgtacagtaaatgaaaatataatgaggaaaagattctcctgctcagtcgctgtttactgaggtatgatctggggcgggaaactgggcttcagccctccaccacggccacccagagggccctccttgagcatagagaggggcttctcatcgggaaaggcaggggagacttcccgggtgacgctgagcagaaaccaataggcaggcaagacacaggcaggggtggcacgggaaggagagaggtggtcccagccgagggggagcgcaggaaaaccccagagatggaggaaaccaacgtgccctgcctcctgccctggatggagaggcccaggccctgaccaccaaggcaacaaaggcctggcccagcgcgtgcggccagaacttccacccctgtgcatctgtgagggatggaatctggagcaggacctttacaggaacccctgttcctctcaggaagggacttggggcttcctaggttgtctacaatccccagagcatccctttctcatgactgccatggccccacttggcacaggcctcagcctccttcccggtgctctgcggcctttcagccccttctccccttctgggccccctccagacttcagtgggtctggagacaataagaatttcctaattccaggctgcgggtgatggatgcagcccaccaggcccctgccacggggtcttcaggaagccatctcccttctccttggactctgtaattaaagctggggataacctactgtatttcctaattagcagccttaatccctcatgcacaccattaacaggctggcgcatctttagatgtgattggtaatgtcgttagcctaatccataatcaatccttggataattgcttccttgggtttatatttagtccttgggggcgctctgtgtgcagctgcacacagag

SEQ ID NO: 196 - DNA, 1585 bp, synthetic construct
  misc_feature 1..1585: note = Description of Artificial Sequence: Synthetic polynucleotide
  source 1..1585: mol_type = other DNA
atagaaaatgagggagagccaagagaaatttggtgctggtggtgactgctgaactttcaggatcattaaaatatactgctaactgcatgaaataagcacatttgactcaagtttctccttggggatggtattggtcagtttctcaggagagaagccctcttcctctcccttaccaaagactctgtctccagttaaacagggagctgcttctttggttattagtggctgccccaccttggtgcatccttggtgtttagcactgatcaccttatgtaccaacatcttcctactagaaccctgagattcttcctgagcttttcctggacttgggagcatgttggcctgggcacatgcaagttgtaaattcttgggagttaatgtagaagcaatggcctgtagccattggtagatgatagataggaactgatgggtaaatacacagccacaccctgccaccatgagggagaaccatcaggtgtattccatgtagttccttatagttccccagtgggattggggcccagttgaccatagaaggaacttcctcctttgcccaaccttttactggattccttcccttcccttacttcctcactcccctagccgtgctttctgggaatatctcccaactagactctgcacatgaatccttgtctcatagtctgcactgggggagcccaaatcaagatgatggtcttcatctttgtacttgctaggtcttcctttgagagctaagcctgaagagtaaagcctcttttgctgatcagatgagtaggttattactggttggcccatttgcagaaggaaccacccaagagcagatgagagaactgagttccaaggcatgtttctgcagagacaaggtagagaggagcagagaattgggcgctgatcagcagcggagtggacgaagggtgaaactttactaacctggagcagaggtctaagcccacaggacactggccaggagagtcttgtttctctgcatacttggcaaggcacttcatcttcttctgtcttctctttaccctccatgtatgagctgatgactctaacatgtctagttctacctctacacaaacacctaagagatgctgacagcactcctcacaataagtgacaattcctgcacctgacacccttggtggacctcaaactcagcatgtcctgaaccaagttcattattttccctccataatcctccttttcaccccaccacaaaacactgaatattttccatcttcagcattacttcctttagctaaaagcaagctctgcacttctaagctatttgctgttcctatcttccacatctgactcctcaccaaaactgctccattctgtcctgtgaatacttcccgaatgaggcttctcctccccatcactggtttcatgttcccatcatccctcatcgcacctgttcagtcatctcatgactccttgcactctcccccttcatttatccctccattttgcaaccagagcagtcttcctgaatggtgaatctgaccatgtcatccctaccaccaaaacctccattacttacaaataaaggtttaaatcattttttctggcattcaaggct

SEQ ID NO: 197 - DNA, 1585 bp, synthetic construct
  misc_feature 1..1585: note = Description of Artificial Sequence: Synthetic polynucleotide
  source 1..1585: mol_type = other DNA
aattcatcattttttgcacagccaattatttcaatctttgttgcaatttttgaagtttatgaaacctacacttattactttttctatttatccattttttccaaatgaataaggacgaatgcaataaaatattcagataatgaagtacaaaaccgtgaacaatgacaaacagactggttggctgtcaggcagtgccaacatagctcaaaattcttgtttttcagataatacgtgaggtataagtttagagtgccactagaaagagcttatggatatcaatgcataataatgcaaaataagaaaatactttatgaaaaataaaactgtaaaatttagggtccatctataatttttaaaaccacccttccaatgaagcatataatctgtctccttaaaggtgacaagatcacttcacagaacaacctagaaaataaagagattacaaacatattcttctaaatatagaaactgtggttattttgaattattaaagctaaaaatacatccatgtatatatatggcctttccgaagtaactgcaaaaaatggggaatatgctctgctcatctggagttaatcttaaacatgaagaaattggttcatgataggatcttgtggagtagttactgcaccatcatggagactcttacaggagatgaaaggcgcagaagtaattttcagatatctagaataggctttaaaaatacaaagttccaatgattcaataaaagacctccaagaattaggagttctcggattttgagttctacaaagttgggccagagaaccatgatccacttttatatgagaaccgttttatatggcacagctacataaacaaaatttatttccccttctattttttgaactatatcttacctaatcaccaagctctcctgaatttattgtgtgtaaggcctgcaggtacatgaattctgtaacaaaatgcctggctcccttctctttaccttctcccagttctaaagtgattaagaccatgaaattggctggaatatataaaaataacttcacttaaactacctaagtttttcttgtattgctgctaccatccctaatatatctggctttcttgccaatttatcacaatctgtaatagtaatccatgtggctaaaggcaaagtggatggagagaactagattagtacaaacattatctaagatagataaaagtattaggtaacagattgactttgggtatgagagaaagaagaatgaatataaaagaatataagataaagtaatagtattgtttaagggcataataaatactttttactcatctacattttgttatatagaattggatgtcctaacatcatattaaggtcaatgtacccatttaattacagacttctcctctaatcatttcacaattttcttagtttgttttgtgctgctctaacagactatctgagactggataatttataagcaacagaaacgtattggctcacagttctgaaggctgtacatgaaacatagtgacttcttctggggaggcctcaggaaatttacaatcatagtggaagatgaagggggagctagtacttttatatggtccaagc

SEQ ID NO: 198 - DNA, 1583 bp, synthetic construct
  misc_feature 1..1583: note = Description of Artificial Sequence: Synthetic polynucleotide
  source 1..1583: mol_type = other DNA
tctctctctctctctctcccccctatactctgttgtgctattgagctgacattggttattaaagatgctctcctttcttcactgatacacagttgctaatctctttcacagatagttttcataacctgtaggtgtttttatctagacacttgtttttctctaatttattctgatccattgctctgtttgtacatctctataccacacttacactgtcttattatacttttacattaggtctaattgagtttggcaagaattccactttttattttgtctaggaatgtctttggctatttttggtcctttgttccttgatataaaacttaaaatcattttataagttccacaaaaagatgctgttcagctttactggcaattgaattggatcttttgatcagtttggggaaaaactggtgtttttctgacattattaaatcttcctggaacatggaatatttatccatttacttaattattctttaagttttttcaataaagctcaaattttctcaaaatgatcttgcccgtatttagttagacttaccctttggagctttgactacttattctacttttaaaatttcttttattttcgtctctgtgactaattgaacttcttactcaccctaccccaatttttttcctccttttctagtttgtaagttatgtcctctatttcaactgcatcagtatttattccagaatttattgcaggcatacttgataaaatctaaatattatctctatttttgattttctactaaatattatataaaacatagaatgcttgaacttgaataactttcctcctaatttatagtatatctttatcaaatagttttggtcaattttgttcatttttaaccttacaaacgggtattatttatactgttttatagcaacaatattgttgatatgtttaccattttctttgatcaccatcttttccttgcttctaggatcaagtgagttatgaagacaaagaagtgctgtagcttttgcttcatttgttcactcatttattttacaaatatatttttataacgtattgggtcaggcactgtgctagatgctagaaaataaattaggagcaaacagcccaagtcttcttctaacttgcattctggtggaagaagagacactaatcacacaaatacaacattacactgtgatgaggctctctgatggaatggtaccagagttatgggagtaaatgactggggttggggatctcacttggtctgggactcagaaacaagttagattaatatgaaagaggaaggtcttacctaagtaaacaggacaatagtgggaaaaaaattggggccaattccaaccaaacaaacaacattccaaaatcctatataagaaaagaaaaacatggagtatttggaaaacaaaaagaaagccccatgggtggcacatatatggaagggggaaaggaccacacaggaaggatgagacaatcctacgtctaaacttagatctgggccgggtacggtggctcacgccagtaatcccagcactttgggaggccgaggcgggcagatcacctgaggttagggcgctctgtgtgcagc

SEQ ID NO: 199 - DNA, 1582 bp, synthetic construct
  misc_feature 1..1582: note = Description of Artificial Sequence: Synthetic polynucleotide
  source 1..1582: mol_type = other DNA
ttccttaggataaatttccaggagtaagattaccagtccaaaggtataacagttttatgtctcccattaaatattactcttatttctcaaaagggttttccctgtttgcactaatagtaatgtgtgaatgtgccaattttatcagtatcaagtattagctttctaacattgtttttctgattttagtaggtataaagtgtgttttgcagttctttggttaacatattaatggaacatttttcctaatattttttgcccatttatctatggggacttttgaagttactcttttatttgaatgagctcttcatctgatggtagatggtgaaccttcttggtcacatttagtacaactagcttttctcattctgatgaaatgtcttatttttcattcaatagaaattttacctttttctttagttgaatctgtcaatattttcttttgtcttttttttaagagaaaccttttaaaacatcgaaattaccaatattttaaataccaaggaggcagtgtgatgtgatggcctaccagatcttgaccttacgaaggacaagttgaaaagatgagtttcaaagtgctcaggagtgtgtgtgaggtggaaatgtcaaccccagcgctgcgtgtgcggccacacactgtgcatagccctcccacgatcattgtcccgccgcctgccttgtgtcctactgtggggttctccttagtcccctttgtgctgaatcgggcagttctttcctgggagctcgtgtggtgtgcaaagggttgacttaaagtagaattggaactttcatcacgacaccaactgcattattatttgagtagtgattgagttagtagaaatcaccaggagaaagaccatcttttcgtgttaattttgcgttcaattttgaattgacaacaaaaaagtgaactcttttaatacgtttgctaaaccttgtcataaggtcagtagacccttaggaagcattttcttctctgcctataagacacatacacatggatgtggagccagtagaaagagtagcttccatacaaactacttagtgagtatcgccagtttcgttttgaagcacaatgcattggacctacccaggacctgtcaatctccatctttgccaaacaaatataatacagataccgaagacatatcgtgcagaactgacctcctttagaaatctacttttttttctttttagaatatatttctgtttcagatctgcatattttacttgttaaggtatttaacaatattttacattttctttcagtcttcacagaaaagtactgtacagctaaccatgtggataagcttcctggcccaagagattgggtacagattctacaggatcaaattaaactggccagaagaaggttaaaaagaggctcaggtatgactaaggtgcagaaaaataattggagaagcacttatgaattcttagactttataaagtacaatacttggctctaggttatttcagcatcttgtcttttgaaggagagactgtttataatatgctgatttgctctcttaaagtcttattcaaatgaattttgaaactcaccttcagactaaatagtaaa

SEQ ID NO: 200 - DNA, 1579 bp, synthetic construct
  misc_feature 1..1579: note = Description of Artificial Sequence: Synthetic polynucleotide
  source 1..1579: mol_type = other DNA
caattttatagggttattaaaaataatgaaataatcaccttgaacgaggggctggccctaggccaaacttgttatcaaagcttatctttgcagctattctcaatttcatgtctccattttcaacagctctttgctgtcctagttcttaatgataatctttatattattcaaaactcagagttggaaagagccttgaaagttctttaagaatattccctcattaattgattaagaaaatgaggccaaagcaacccaattgacatatatatcttagatcaattgactagttaatggaaaaggacaagattgaaattaaaacaattccttaaggaaaaaaaaatcacagcttcatctaatacacaggagcatcaaacaaaatcctttctggataatcctggcagaggttttgcctcagtgtccagaccaagtgttccctgatagacctaacacacctgagcctggttttccccaacatgtcctcataagtttcctgtcctttcattctcaagttgatgaataagtaataacatataccataaaatgagcaataagtaaacatgtcatccctcacacagtcaatatttatattttaattaggctttctgtgtacacagatatttaataaaaaaggaaaacatctccactgccatttcagggaatttgataaacatacaaagagcattttgagaaggctagctactcagtagctctcaattcatgactatcaggaagataacaactgaggctactgcaataactaatgaggcgatgcattcagcctgcttacaagaaaaggttacagctgtgttccagtgaacaagtaacaattattcacacagcacaactaaaactgtacagtttaccatccttaatcactggtgcctatgttgctttgtgaagactggtttgttctctttacataagatgcggatttctgagagtcaaatactgaattttaaaagacctgagtcaaaaaaacaacatgtcagtacaattaaatcctactcatgactctaacagagaatagaaatcatcatccattgttgcctagtctcttggctatttcaattttatttccattccatcatttgaaccatcaaaaagtgattctgcacaatacccttattttgtcgcttatcaaattgtcacgattgcaattgtctgtttctttgattatactttcccaacaactgtgagctgtttgaggactggcacaaggttgattaactatttatctccagtttctagcacagcacccagaacagagtaggagctcttcaaaacttttctgcttaataatctacaataattattttggtaaataagaaaaaattatatattcacacagtgaaacttgcaataatgatcaaagaagccagctttccttatttattaatgctgttctgattttatgttggcttctaattcctttataacatacatttttaaaataccaagtttctacttaagttggaaatattcccatccccattcgacagaataatttaagtttagtgattcacttgtttacacttaccaaaaatagacatgccaatttatcaggcgctctgtgtgcagc

SEQ ID NO: 201 - DNA, 1578 bp, synthetic construct
  misc_feature 1..1578: note = Description of Artificial Sequence: Synthetic polynucleotide
  source 1..1578: mol_type = other DNA
atacaaatggccaacagttatatgaaaatattatcactgtcattaatgattagaacaatgcaaatcaaaaccacaatgaaatattattttattccatttatgatgactgtcattaaaaaggcaaaaagtaataaacgctaccggggatgaagactaaacggaactcttatactctgtttacggttatgttaattagtacagccactatggaaaaaagaccacttttatatgaaatggtatcactttttaattgctatataattgacatataataaaatgtatacatttttaggtacatttttatgaggcttgacaaatgatacacccatataactgccatctcaataaaaggagagaatgtttgcatctttccagaaagttccctatgctccttccatcaatccctgtctcaccagccagcatcaacccagtgcagtagtggttgtgatttctgttactatagaatagatttattatttctagaatttcatatgtatgtgtgatttttttccctcataataatattctcactattcaaaaatgttgagtttatatcagtagtttattccttgcattgcctagtagtattccattcagaatatagcacaatttgtttatccattctcccatttatgtatatgtgttttttctggtatagtctgttattaaaaagctgctaggaatattcttgaacaagtcatttggtgaaaatgagtttttatctcttttagataaatgcctaaaattgactgctgaggggtgaattgtggagatctgttcaaagatttaagttgtatctgctcactgtgatatctccagtgtctgcagcagcacctggccaataacagatgcctacaaacattagttgaaagaacagatggttaaacaaccttcattgatcatttattctgagtgatgtgatatccttagaacaaataacaatacatattgtcctagcagtacatatggattccaggcaaaagagtgttcatttttattattttgtcggagtgtgcaatggggaaaactttggtgggaaatgtcgataatgagggaggctgtgtatgtgtgagggcagggaatatatggaaaccctctggacttttctctcacatttgctaaaatatataattgttctaaaataactaagtctgagaaaaaataatggggtaacctttccttggcagaagacgagtattttggttgtggtggcttcccaccgcgaggagcagcttcaatttaccttgtgccccaccttgcttcccctccaacccctatatctacttttggaatcttcctggaggttacaacccacttgaagagctctgtttgagattttagccttggttgaattaaggaattttagactgagagcttaatttctctaacctccattaaagccttaactaactgccttgtggcttattccttctctaagtagttgcagcttcttattgtgagattattttaggcttccacagaaaaaataaacaagaaaacatagtttcaagggacctttttgtgtgtgtgtgtttctttagaattacaatctcctaggcttcactggattttgccatg

SEQ ID NO: 202 - DNA, 1574 bp, synthetic construct
  misc_feature 1..1574: note = Description of Artificial Sequence: Synthetic polynucleotide
  source 1..1574: mol_type = other DNA
gaggagtagaattttatttctctttttttttgagagataggctctctgttggccaggctggggtgcagtggtgtgatcatcactcactgcactgtcaaactcctgtgtttgagcaatccttcagcctcagcttccagagtagccaggactacaggcatccagcattatgcctgtatttttttattatttttgaagagagagggtcttgcattttgtttatacttttagacctagcaacaagagtggttctagatctataaggtgaactttgtaatataattttattaattcataagttattacagtggaagaatatttctactgtgattactccttctcccaccataaacagtataaaacaaactacgtcttatctaaaatacatataagacacatggacacacaaaagagtgaattcccagattcttgttcttttgaccctgggctgatgctttgacttgaggaaatatgtgccattacaggggttggtgtcctttgaagatgtggctctgcacttcacctgggaggagtgacaggacctggatgatgctcagaggaccttctacagggacgtgattgtggagacctacagcagccaggtatcattgggtgagtgaaacttcccagtaactcccaagaatgtgtattgttgttggtaaatatagaaacccttttaagatataataatatttacttgtaagattctggttgatgaaaaatgtgtcattattctaatgaaatgttcaaattggctccttcattacacagtccctgaagcccagctcttgtcattctgaaaaggatttgacttagtggtttgacaaagtattccattgtttctcgttaccagggcattgcattaccaaacctgagatgatcttcaagctagagcaaggaacagagacatggatagtagaagaaataccaaacctgagactttcaggtcagtcagtgaatactggggtgggaggcctggaggagtaatgcccagcagattttggtagtgttatcttgttttcaccacttttttccctaggtcttcgacctgaagactgttggtctgcattaaatgtccattatatagtccccaggggtaactgtcatgcatatatcccagtctcttatttttctgagtatcttcttctatttaccccaaatccaatccctgccatcctctctttaggcctttttctttgctatttattttatctatttcccccttttcctctattctgatgtagtgtcttaaaaatttttttagacatttatgcatttatttatcctttgaatgtatcttaagcaatttttgagaatcagtcattataacaatgatgatgaaaatagtgtttctttttaagctgtagctttattcttcttgttttattttttatcaaacagatggttctcactctgtttctcagactcaagtgcagtggcatgattatagttgactgtaacgatgaactcctgggatcaagtgttcctcacagcctagcctcccaagtagctaggactacaggtgtgtgccaccacacctggctaattttttattgtttgtggagatgaggtcttgt

SEQ ID NO: 203 - DNA, 15851 bp, synthetic construct
  misc_feature 1..15851: note = Description of Artificial Sequence: Synthetic polynucleotide
  source 1..15851: mol_type = other DNA
gtactggatcagatgctcttccacctaggggcaggcccagggctggcagtcaggccccagcagcacccttcatgttctgcctttgggtgcaggaagagactgacccttttagggcctcagcttccattggtggaaaatggggaccataagttctggttcccagaggagttgtgaggaagaaaggggatattttattttattttgagacagagtctctcgctctgttgcccaggctggagtgcagtggtgtgatctcggctcactgcaacctctgcctcccagattcaagcgattctcctgcctcagcctcctgagtagctgggactacaggtgcgggccaccacacccggctaattttttgtatttttagtagaaacagggtttcaccgtgttagccaggatggtcttgatctcctgacctcctgatctgcccacctcggcctcccaaagtcctggaattacaggcatgagccacagcgcccagcccgagatacagcatctaaagcataggtctttctgaaatgtgactccctgtctcctctctgtataacccctggactgggagtccccggggctccctccactctgcccccagagctgggctgcagcccctgggcctctctcacagccgtacctctctccagcagaaggtgctgagggtcctggcttgaggcccatcctccttctgcagggccccatgccggggtggctccagcacctgcaggccaaggcccgggagagtggggaagtaggacctggcaacgcggagcagtggaggggccagggtgcagctgcgactgtgccccctctactgctgaagttttgtgcccccagtggggatgacagcaggcagcacctccagctccacgtgacgtcctcaaggggagcacccaggccgaggccacatccagcgagaaggcatggctccgggcctcagggcgggagtgcaggtagaggatcctgcctgtgtccactgcctcttgggagaagctctgcacggggtccaggctgggtggctcatctgccaagatgccacgcagcaccatcaccaggtagccggcactcggtgggctcttcactgagaaaacgatgtctgctggcggcactgcctcctgggctacctggttaacagaggtcatgaggactcacaagggaatgcgcagaggggtctcagaggggcccactgtggccctaagcagccagaacagccttgatcttgctccacttatttccccagataccactgctcatttagtgacacacacacatgtgggttcacacacacagcagccagacatgcagctggtcacattttttgtttttttgagacagggtctcactctgtcacccaggctggagtgctgtggtgtgatcacagctccctgcagcctcaacgtcctaggctcaagggctcagcctcccaagtagctgggaccacagtcatgtgccaccatgcctggctaatttttaaatgttttgtgtagagatggggtttcactgggttgccccagctggtcacatgttaatacccaccccacacatggttacggggtgtcggtcaacagcttgagatgcactccctcagggaggtgcataatcacatgtccccagactcagtgacacagacatatgagttcatcagatgctgacgcagtcacacaggtacaggtacacatgcgtgtgtgcacacgcacacaggccccctgctcaggatctgttcaggcctgtggctggtttgctggcagcatcctccccaacccctgctattaccacccaggaccatcagagggcgccccgccccacccctcctggaggcacagccgccttcagctcaggccctacagagctcacgccccaaaggccacacgggctccctcacctgacgggccagccacaagaggccaaaccacccccaaactcacattcctgttctatgcctttgcccggaatgttccttctgcctggaataccactccccattctctgctcctgatggcctgtgctcttcagagcccggcccaaacgctgcctcctcccgcgaggccttcctgactccagatctgctggcttgctgtcggccccaagctccagacatgcagaccagaagggtctccgaaatgagcagtgtaggagagtaaggccaagagcgggcaaggactggcctgaggtcacagggcatgtcagatctctggaaggcccgtggctgctctgtgaggttcctgggtaagcagaagcccttgacagaccctcctggtcctggtctgggctctgagaagagagcaggctacacaggggtctgagaggcagcggcctgtctccacggccagcaatcccaaaagttcaggacccgtgatgccctcccagggaactgactgcaatgcagattctcgggctccacttcagagattctgtagggctgggtggcgtccaggaatctgcatgctcagccatgccatggacatgagtgggcaccagctctagaggcacacaccactcccaggaggatgggtgtacagcaagctccccagaaactcttgggaacacaacatatatgggagcacatctgaggcacgtgcacacacgcaagctgggaccaccacaggtacagcccaagtcacatgtgttcccggcatggaggctgggaggaaggccctctacctggtccacaccccgctcaccacctccagctcctcacctccagctggtcccttctgatctcagctgcctctccctggaagatgtagatctccttgtgctgggccagcttcagtggggctactgggccctctagggcaatggtcacttgtagggtggcatctgtgtgcactggtcccacatccattgagaaggccagggtgttgcgggagctgaggctgccattgtggccatagagaacagccccaaccagcaggtcctgctgagagaaggctgtggctggctgagtggcttggagcaactgtccccagtgagggctgtctgtgacgtggtagtgggcctcatccctactgcagatgttgaggttggtgcccaggtggagctcggccatgttgatggtaccctggcctccttgaggaaccatgaggccggagccattggccacacagaggtaaggctccaaggcctgcacctccagcaccgtgatggcctggtgctgcccatcggacacctgcagcgggatccagccgtggtcagcctgagtgtgtgaacaggactcgcctcttcctgaggcccctcctggatgaagcggcagatgggctgcatgggctcatccgtggccatgatactgccagagaggaggtcctggtgggtcagcaccagctgggcctcagcaaagcccgaatcagcattgctgaaggccatgttgtctgtagtcagcagccgccacctaccccaggccacgtggaagacgcagctgatggtctgcataggggcgtggtcattcacaggctggatggccactcagaagacaccccatacctcctcccaggccacgtcaccactgctctggtcctggtggcagcaggaaatgggatatcatcttctgtgatctcggagtcatcatgctgctagaccagctggccatgcatcaggtctccattggtgaaggatgtcaccatagtgatcttgtcctgtgtcccacaccaagtcaacctcccatggcggggctgctccatgacctcatagaggtacctggcactgttgagactcttgatgaagagctggtcagcagagaggacacactcaccaccctcgggcaccatgaggacaggcatgtctgggtcaccgccaatatggatggagaaggtacagagtggggagaaatatggtggagctgtgacatggaaacagaaggtgtcctccactgccactgaggcacgtgccatggccccataggtcacctctgcagcctgtacgtcatcctgggtgaagccctgaccgtctgacagcatcatgccctgtagttgaaagttgcctttcctgggagcctgaaccacctcacagtggaaggttggggggcttgggcctgcctcctccagggtggcctccaggtgggctgtggtgagggcctcctgctgggtgttctgagtgtgcagtggctccagctgcagcatccacacagtggctctctggatggtcactaggaaggacagattgctcaggatttcccagctcacctgcacctgcagatccaggttctccacggtgtcctcggtgtagtgctgtgggtcagtgctcaggtatctcacatggccctgatccacatcctgctggtggaacgcctgtgtgacccaccactcagcatcctccaccccaccagccccctgcttctgcagctccctgaacggcaggcctccggtgacatggaacagcacggtcacatcctgccccacggcgctggtctccaccaacaggttggtaggcaagatgggcatggcagagccctgggccagatgcagccctgtgctgcggtggatttgtatggccagctggacagccaccaccttcagcatggccggggggctggcctgcagtccattgctgacccggaatgtcaagtcctgtgtagggccaccacagtggacatagactaggctgccggcctccaactcccagcaggagaactcagtcaccggctccccaggctggtctcggtgctccacggggaggccagagggggtgccaaggagctggaaggcgaggccctcacaggcagagtccaggtcataggcctggagaacctcaggccccagaggcttctgtgtgtgttccaggatcaccataaggctgccatgtgggaagatgatgtggggtgggtcattgacagggttgacctggatgggcaggaggtctgtttggcccctccgcaggcatgagggcataggcacccaagccatcactgacacctccagcaccagctggtcagaggtgtcctcagggccatcgtggatgaagcgggccttgcagttcaccacgtccaggagggtgaacatttttcatgcctgggcacccaggacatccagctcgagctcgctgtagtgtgcccctcaggtcacgctgaacagcacctgggatttacgcagttcagcctccatcagtgccagcatgggctgcacatgccaccactcaagccaggctgtgccaccctcggtcaccaccactgcgctgatagcagctggatgaaattggcaaagacaggaggtagccctggctcaggcacgcatggctcagctagctccacggacagccaagccttgggagccagggtggagaaagcttcataatggccataggcattgtctacctcctccagtctgcagccagccaccatgttgtgcgtcagcaaggcttcccacagcccccgcctctagccattgacactgaggtcttccatgcagccagcccagcagggaggcattggcagcccctggtgtcaggcctgagcggtgttcctggaggtgatgagaggcctctgcaaccagctccccaagaaggagactgtcacgtggctccaggtagctgaggactcctcggttcaaagtacatgtggggtactggtccatggagatttctagctggtgaatgttgatgtggatgctgaccttgtggggctgtgcgtcagtcacaggcacactgttgaggagcaatacagtaccctggcccttctcaaccatggaccacaggtggccctcaaatatgtccacatggatgaagtccccatgccagcctgctgcctggaaggccaagggtgcctgccagctctgtgtggtgagtgtaaactccagggttccttcatcctgagtgccccaggcaggcaaggcagccagagagtgggacccagagaagcccagggccacatcgtcattggcagaaaactcttcagcacagccctcatgcttattgggggtcagaggctggaggagtctgcggccattgagagcggctgcatggaggcaacccctcaggggatggctggttcccctcaggtagggcaggccaagtctcccagtgctcccaacaaagagcccataggggacttctaggggggctcccaggactacagaggaggcattcagaaacccattgactgacaatgtgggccagtcctctgagacagtcagaactgtggtgtgggggacggagccactcagtagaatttctgctggggtctgcagcctcagctcctcctggcccaggacaagcctgacctgaggagagacggggaatgggagatggggggcagcactttgaatccatcatttcccttataaaagcacagtgggttccccacagggggccccagagcagaaaacctaggacaagggcctctggtgccactcctcttgccttcctgccatctctttattcatcctccaaacactcaccaaaggaaactctgggccaggcctggatgggctctggggaccctggtgtgaatcagatgtggtccttgcccacaaggaactgacatatagcaagatgctcttctagaaacccaacctgtatttttaaattctcctcctctttccttgagtgaaaagcaccagaaatattgtcttggaatctagatttcacccctggaataatgggtaactgagaatccgttgatcagtccccctaagtttggcaaagtttctcgaggtcactgaaggaagccaggctaactgttcagggacagggagcccaggcagatgctctgtgttctggaaaaaaaaaaaaaaaaaagctgcctgacctgtggtggaggaatatctcaaggagagatgaaggacatagttctgtcaccatgacattgacacaagaaatggctctggtatggtgctcccagatgctagaataggtgatggcagagtatgggaactgcagaaccagaacactaagaaccatgatcttggagtcctggtatggtgcatctctgtagggatgtggcatcactacctgcagagctcaacagccatcagcaccagactgcaccacataggtgttcaacagtgacaccttgtggcaatgagcagcaatgacagcagcagactgaccaagccctagtcctcttcccactggggtgtggaaagagatggctgccccaaatttgttaatttgttttttttttccttctaaaatagagatggggtctcattgtgtggctcaggccagtcttgaactcctaggctcaagtgatctttccaccttggtctcccaaagtggtgggattataggcataagccactgcacccagcctgccccaaatttggactaagaccctgggttcttaaactcttcctggtatggggtaagactcaagtaggagccacaagactccttgataataaagcttgtggtgtcttgaaggatgaaatggaaaaatgaagctgaggcagtactggtgctgttactctcatggacagacagtggtgctgcagataaattggtgcagtgccaccaggatgcgcaggggtcatgggggcccaggagggggtctcgccgaggaggaggggatgcccacactgaaacttcaaggagagactagagttcggcaggtacagggaatgggtgggtcacacacctggcaggaggagtgtgatgaccaaaggcctggcagcaagtgaccataagatggccaggaactgaaagcagttcagtgcagtcagagcacaaagggccagtgagggcttgtggtgggaaacatggttggaaggagccggtgggcagagccagttcatgaaggatttaccatttctgagctgctgctgcccatcccacagtggagaacttgagaccccaagaaaagtgacttacacaaggtcaacagccagctggggttcactcaaagctagacaaggaatctcgccccaatcccagggggacgtcactcacctgcaggtgtccagagtagagctgcagcaggaggtggtcagctgggcctgctgccaggagaaggagggcttcgggttgggacatggagaactgcagctgcaggtctatgtcagtcagagccatggccacagtcacctccaggtggttctaaccaaagaaggaagctgtgtgagagagggagctgtggtcaaggctcagattcttgcctggaggaggcgaggtgctgcagggagggatgggtgggttgcagaaaggggtccgtgctggtgcaccctcatggttctgccatacggtgctgcctctgagcactgcccagatcccagcatttccttggtcctggcaccagaaggcacagcctcaccttgtgtccagcccagaccttgacttggcaggaggtcagacccagaaattcccagcaactcaggtctcctccttggaggttcctggagccagaggcctctgccagctctgactcacctcccctgggccccagaggagtctccctcccaggtctggctccccgacctggcccaaagggaaacatcactggcctgatcacctggcttggtggtcacagccctgaggaatggagtttctggagaatcaccaccaggccagatcgatccctgctcagattccttctcctaagtgcccttgtgcttgggctcctgtgcagcacctgccgtgccatgccccacctccatgggttggctggggccacggctgggatctgggggtgatgtcagtgcagcccacctatccctgcttctccctcaggccattcttccagctgccattgagggtgggggcaggagcttattggcctgagtttgccaaggagtaaaggctctcaggccagatggggaccatatgcagtgtcaaaccaaagtgggcccacacttcctccactacccctgctgttgcttcctgctagagagctattcacagtccccgctgagcagtcagatccggccccattgtttccaccgtggccaaggaaccagggatgagaacagctcagctcccaacctccccaggccaccactcagtctgaggctgaagacagggcctagaaggggctgagggtctgctgagcaggccaaagagggcctccccaggcagaaggccatgtctgggcttgcctggggttagtggttcttatgcagggcctgttctgtcccacagtgggactcctcctcttttgagttgctgcttcctccaggcagtttccccaaattagcctccctgacttccaacccgatgccataatttctggtctatgccttttgcggtgataagagccaaatataactttaactttgcctgcagatgtccagggctggggggcagacaaacacaggttaaaaactgtgattcatccctgttgggtttccctcaaaccccaagaacaagcacaggctgatggccttgatggggtgatccagcaccgacctcacatgcactggtccctagccagcctgagccagctgccatctgctcgaggaagtagcttcagccattggaggagttggaggtttgtataccctcagggcagccagtcccacctggagggatatccaggaaagatcccgtaagagcccctcgggttgagttaaatcccctctagttatcccctcctcctgccagcactgctggcaacaccagcaccttggctgggaagctaagggaatcaagcaagccccacagaccatctgtgtgggggtggcccagcagtctcagcaggcacagcacagcttggtgccagcaagagacagaccagggaactgcaggtggtgacctactggggtgccttatctgcaaagacattgattcctaagagcaaaacacagcacactaaagtgagggaggccatagcacaaggggtgggggcacatggccctgcaggatggagccaccacagtcaccggctggaacggctcacagcagctgccaggagccaactgttgaattttcaggaattttgagaggcaggtgatactgcccacagtgggaatatttataccaggaaaagaggcaaatactgaaaatcagggttccctctccccaagaaagccctttgcgaaacatttacctacccagcacccacggggaagggggcacatctccctgtgcctacccacctgtgttaatcagggttccctagagggacagaactaataggagatatagacagatatagatatagatatagatatagatatagataatagatatagatatagatatagataatagatatagatatagatagatatataaaggggagtttatgaagtattaacttacacaatcacaaggtcccacaataggctgtctgcaagtttgaggagcaaggagagccaatccgagtctcaaaactgaagaacctggagtccgatgttagagggcaggaagtgtccagcatgggagaaagatgtaggctgggaagctaggccaatcttaccttttcatgtttttctgcctgctttatattcgctagcagctgattagaaagatggtacccaccagtattaaaggtgggtctgccttccccagcccactgactcaaatgtttatctccttttacaatgccctcacagacacttccagtaggtcaatactttgcagccttcaccccaatcaagttgacactcagtattaactgtcacaccacccttgcactaaaggtatacatacacccactagggcatggtcaaggtcagagatctgggccagacaggaactgaagtagatggttggccctaaccactgaaccacctgcctgcggcctcctcccatcagaagagagtagagcctgtttggccagagtggaatggtggcaggaagcagaggtactttccggagcgctggggtctgaatgggtccattgaggctgggccctgctgcttcctgtagggctgagtgggagaggctcacagaggctgccttgtgcagctggagcgcatagccagggaggcccccactccaacagaggcctctgaggccttgctggccggggctttggaaactctgacagcgctgcttccctcacctcctgatctcctttttctgcccctcttacactctctgaggggctgcagttgcaagaacccagaatctctgtcttggaggtagtggggggtgggcagttgaagaggggctttgaatggagagggtctgcacaataaagatgtaataagctaggagtcaatccagaggacttcctggaggaggtgatggtggtgtagagtcacagagagggaggaacaggcagtctcagaggacagcagcaaggccaagtgagagactggcagaggtatacaggtccccgttggctggggtgaggagggtttctgctccctcaccccccagagcctctggcttatcacaggataagagccagctaagctccaggggctttccaggaaaagtgtctcttggaaagggtgtgaccttttcatcggtcctgacagcaccctagaaatagcttggccttttccctcccctgagctccacagagaacacagccagcagaagacacattccctgtcatccagaaatgggtttgattctcagctgagggacagcaggactggtagagactgtcaggccacacagctacctacagagcacccccatgcttggtcgggggtgggagggatggcagggtctggctgtccacaggccgggcatgacagtggggcgcactggaagtggcgcactttggaggggcaatgtcaggggagagcttcctcttgttgggccacaagactccacaaggacagcacggtgactgattcccaatgctagaggcgaggcaatcggtcatgtgtaggtgtgtgtgtgtgtgtgtgtgtgtgtgtgtgtgtgtatacacacacatatgtgtgtatatatatatgagggtgtgtgtatgtgtgtgtatacataatttatttatttagatggagtcttgctctgccacccaggctggacctcagtggtgcgatctcgactcactgaaacctctgcctcctgggttcaagcaattctcctgcctcagcctgccgagtagctgggactacagtcacctgccaccacaccgggctaatttttgtatttttagtagagatgaggtttcaccatattggccaggctggtctcaaactcctgaccttgtgatctgcctgcctcggcctcccaaagtgctgggattacaggtgtgagccacagcacccagctatttatagatatttatagaatatgacctcaactatttaaacatatctgtaagggtataagtactttgataacaaagaagcaatacatactgatagaaactagctatcatgtcaacagtacttatattaggtagagaaattatgtgagatttttatttttttatattttactaatcttctcaataatggttgcttataagttttataatcaagaaaaaagatttctaaagtttttgcaaaatggaaagttatgcttctttatatactaaagacaaaaacaaaacttcctatttgaatacctttgacttttactgcagacttacagacccttgaaagaaaaggcaatcccctcccactagttttggtgtcattctccccatctctcccttcacttccaccttggtcttctttctacttcccaccttggctagtggtctccacccaaaatgcttgcttggcttaatggttagaattcagggaaaaagagatcccgaattgctaatctaaactaagattatacatgtgggaaataataaagagaaaccaggtagtaaataagatttggaggacttaaaatacccagactttaattcctctaagattatagttattaatcatgtttttatataatattatcacttaacatttaatttctaaatataatgttcatgaggaaaagagaaaatagcttggtttctttccttaccgaactgttgtccttagtatcttctagacgttccagaactgatgtcagatttggctcatcagagtccacagaccatatcggtgaagaagatgaataggattcctgtttaacccagagacacctatgttaaatgtttacatacagactaacccaaatatgcaattaaaccacaccactaaatggcaagatgaccatggatttaaacaaaatgtatcagggggaaaaggcaacacgtttaaacccatgtgaggagctggacttctgagacagccattctccttgcatagcactgtctgctgctacagctcatagaagtcaacaattttcttcaacactggtaggcagcctctaaatggccctgatcaccctcacctcctgccattcacacccttgtaaaattccacccctggacctagtgactcacttctaacaaagagaatacagcaaaagtaacatcgcttctgaggtgaggctacaaggagactacgatgcctgccttggtcacccttctcctgctctttccattgctccctctgatggaagccagttgccatgtgatgaggtgccctatggagaggcccacgtgacaaggtattgtaaaaggcctctgaccaatagccatctagaaacggaggcccagtccagcagcctctgagatgaatcctgccaacctgagcttggagacagattctctccctatcctgccttgggatgatcacagccaccaccaacaccttcactgcctggtgagaggccaagccagtgaacccaaggtaaactggacagaatcctgacccacagaaactgagataatgtttgttattttaagctgctcagtttgttacagagcaatagataactaactcaaacaccataaaattctaatattttattctatcacacaaaccaggtaataccaagtaaatgccattactatacatatatttttgtaacacaattacatgtgattttttaaaaaagctaatgaactatgcattatgtgctttcacccactaacagacgttcccgctgttactttgtactgttctctattataaattggggaaaaaccattattattatatattagtttcagaataactaggttcaagtcacagaaaacaattttgcacaaacaactttaggcaacactgctttgaaaactgtaatctgagttaaagctgaagccacagaaaccaaatatttactgaaggttcctttttaagaaaagcaagatgggccgggcacggtggctcgcgcctctaatctcagcactttgggaggccaaggtgggcggatcacgaggtcaggagatcgagaccgtcctggctaacacggagaaaccccatctctactaaaaaaatacaaaaaaattagctgggcgcgctggcgggtgcctgtagtcccagctactcaggaggctgaggcaggggaatcacttgaacccgggaggcagaggtttcagtgggctgagatgtccactgcactccaggctggcgatagagcaagactccatctcaaaaaacaaaaaaaaaaaaaaaaaagaaaaacaagttgtattgatggaggacatcattaacagtatatctcttcaataatggtttattttactattctcattcttctcattcctctcttactgtgttccaaatctctttacaggctaaaagaaactcttcagaattactcctattcttttttttcttttttgagaccgagtttcgctcttgttgcccaggctggagcgcagtggcacgatctcagctcatcacaacctccacctcccaggttcaagcaattctcctgcctcagccttcctgagtagctgggattacaggcatgcgccactacgctcggctaattttgtatttttagtagagacggggttcctccactttggtcaggttggtctcgaactcccaacctcagatgatctgctggccttggcctccaaaagtgctgggattacaggcgtgagccaccgtgcctagccggcattttattattattattattattttattttatttatttattttttgagacggatacttgctctgttgcccaggctggagtgcagtgccacaatcttggctcactgcaacctctgcctcctgggttcagacgattctcctgcctcagcctcccgagtagctaggactacaggcacccaccacacctggctaattttcatttttttagtagagatgggtgtcaccatgttggctagtctggtcttgaactcctgtgttcaagtgatccacccgcctcggcttcccaaaatgctgggattaagggcatgagccactgcacccggcctctttgttttttaatctgaacaatgtatttagctacttagagtcttagctacctcatcaataaaatggaaataagaatgtatcccttatttcatgtatgccaatgtgtgtgcagagtaagagagagacagagggcacagaagagaaaaaagatggttaactgggcatggtggtgcgagcctgtggtcccagctacttgggagggtgaggtaggaggattgcttaagcctaggaagcagaggttgcagtgagctaatatcatgccactgcactccagcctaggcaacagattgagagcctgtcccaaaacaaaacaaaacatgaaacaaagagaaaggggatggtatgtaataatatacatgtgattcacacagcaccagctgaataagccatgttaaatacagcaagtcttcacttaacatcgttgatgggtttttagaaacactgaatttaattaaatcaacctataatctcgaaaatattgcttacttcaatgtcattttattgtagtgttaatgagaaaaaattggttttgatagatatcaccttatttaaagttaatatttccaagaacctatcaacaatggccagtgagaactcactatatgtgtacatttccgttggcccttagaaaataatctcatagtattggtctaattacaatgcctttgtaaagaaaaaacgaacacatttttgttgcctgtgacaaagcttttagggctgcacacagagcgc

SEQ ID NO: 204 - DNA, 8945 bp, synthetic construct
  misc_feature 1..8945: note = Description of Artificial Sequence: Synthetic polynucleotide
  source 1..8945: mol_type = other DNA
gctgcacacagagcgcgaactaactcaggaatgggaaaccagacattgtatgttctcacttataagtgggagctaagctatgaggatgcaaaggcataagaatgacagaatggactttgggactggaaggaaagggtgggagggcatgatggataaaagactacaaattgggttcagtgtacactgcttgggtgatgggtgcatcaaaatctcacaaatcaccactaaagaacttactcatgtaaccaaatacctcctgaatcccaataacttatggaaaaaaatagtcaacatcaaaaacttctcaaactctgtgtgcatgtggaatacgccagcccactaccaatgaaaagaacataatatctatccttttgagtatctagtccctatcctcatgaaaaaaatgcaacattttccattccagtaagaaaaattaaaagaacttgaattattgtggcagggacaactgattttactgtcttacttcagagtgatatgaataccctcattttctttcattatatagtctggagagacttttattttcttgatttttgacaaaaaaatgaaatgtgacatgtataacattatgctaactggagctggaaagcacgaattagcaagcagctagatgtcttaggaagacatacatatataagaggttgggaggtaaatactgttaaagttcaggagcctgccacataggtgaatctcctaagggtctagtggtctgaggacatgggatctatttttgaagggaagaaacaagtcacagatatttttgttagcactgcaaaataatctttaatgctaatttattctatgttctatttgtctcaaaaaatgtgctttgttctttcccatattttctgatatcaggataggaaatcaatagcaaacaaaacataattccattcattttttttccacagcttggttttcactgctgtttcctaacgcttattgttccatttactctttctctctgttttccatcacataaaagtaactttgtgttctttatctcttctaagaaaacttggtaatgagtctttaatgtgacgcctggaccacccttgttttgattttgtgttatgggtgttcttttgtgtgatcgttctcatggagagtccttgtgaagctgggcttttccagtggtttgtcaaaatggaaatagatatttaacaaaccaaacacaaaatgaccttgctccaggaatgcatcatttctgagaaaacactacctcttccaactagagattgtgaatattactcatattatcctttactcccttttattaaaactgtattttttttacacatttgtataactcgggtaatgaaatgtgaaactaagtgattgcctaccaattacaattgatattaatgatgctagtgggaggccacctctacagtggctgcaccatgtctagggacttgctagctttgctaagttacataggattgcctacgtactaaatgcaaacttactcatgcacataggaaaccatttgtattaatatgattaagaagccctgcctaaccctgatgaaaaattacttgaaaataacagaagagagtccttattttaaagtacattaactattgggagtaattactatcagtccaaacataactggatctaatgagactgaacagaaacaaattagacataattggaagctaagcaaaagtcaattaaactcctataattttacctttataaaaattattgaattaaatgacctggatcaattagcagaggaaataaagccatgaagaatatttccgggaaactattaccttttttgagggaaaaatattgtttcacttaatgattagaatttagtaaaatgtagcttaatgaattttgctgccttagcagtttaataacttcaaatgaagtaattatgcaaattttttgatagcttgacctaccaagtaatgcaggagttgttttagggaatccaggagtagaatttatttgatagaataaaataacatatttataaaaatcagcaaattcagatggtttggaataaagatatgattgcttttactcaatattcactttagggctgggttagctgtgtgggaattgcagttgacctgttgtagaaattgtgtgcttggaaatatatcaccacattgctccatgtagactccctctgtgattcaagtcttgttcctacagcactgctgtcaaccttcaaccaccgtcaccctatagaccccaagtcagtttgtattcagtaatgcaagtggtgttctgtgcaactggtcacccaagaacttggtgctaagaaactgagaaagtgatgaccaagacaatctcatcaaaacacagccagggccagtcacagtatcgtaatttctgctttctggatgttcaaggaaatgtagatcatgactccttctgtgatgcctcattatcttcaaaaggagctataagcgtacactcatttccaaatgtgatggaataagattgcagtttcaattaggtcctaaagtataattaattatataatagttataaaaatattaattctgtaaggacagtcacaaaggaaagaacagtagcaaataggtctcaggaaatatatcaaatgagatgttcaggtgtgatgcagctttgtacatactatgctaaatacattatgtctgtaattaaaccagctgcatacacaatgcaggtgtggcaaattctttgctgaaacatgtatgccagtttcctcattttttaaaatgacaagtgcatgcttaatcaggttagagtggatagattatgatattatcaatgcactggacaaatccattaatgatatagtgagtttttgtgcagaaatatggaatagagaggtgtgaatccaaactttgaagaataaagaacatacatttgtaattaagaaatatctctcactttcatcccttatgtgccacacatagcacaatccagccccacccagccatgactcttacatatatcactcctgacaaagccggcctggcaattcagacctggagcccagggaaaagagaggaatcccatgatttctggcaaacactgctgcttcttttgtagtggtgtgagatgaatgcctctacatgcacacaagtgccatgttgagggggatgaatctttcaagatttgtttaaagtcaaataatgtgaaggtccatgactgacctccaggcctctcagagcttcagttaactcctttgtgttaggggatgttagaagaacgtttacaagtcagagcaggtgatgctcaggagcaagagtgaatgaggaggaggaacccaaacaggtccagcacagaacatcagcatctgagcatcaagtctacccctgagaaaaagtggtccaaaggtttgtgtggaccccattctccaggccttacaaaccctgtgatttctgcctcattctgtcccgtcctgtcactttgagtctgaattggaagagagaaaaacagtaactagatcagtaaagtaaggaggagtgaagagcaggaaggtggaggtcgtgatggtggaagatggaaacctcctcgcgtgaaatagaacagtttggatgtcagctgtcactgctctagatctcctaaaacccactccatttttattaaaaatatacattgcatttttccagtgtacacgatatcatgttaagagttcataaagttttgaggatgtgagtaatcagaaaggaggtttaaagaaccgattattttggtggtctggctcctttaccccagtaggaaaagatgccattttgcttatgccctgtgctgaatttcagaatgcctgtcaacccaacacgcttcagcatgaactttaactcaaaaaatcaaaaagtaccaggatcaatttacaatcctagctatatgatattttagaaattacaaagcctgtaaatgagctattttgtcaacttcatagatgagaaatctaagagtgggttagtcagttctcttagatttctcatatccataaagtggatagaacatctaatttagaggcttgttgaaggatagacagaaatggcatttacaaagtatctagtgaaactactggtagggattatatgctcagtaaatgatgagcactataatcacaaataatttgatctttgaaagtgtaaaatgtatttgtctgtctgcttggtttttctcggaggcatagtttccctctgtcactcaggctggagtgcagtgctgtgctcactgcagcctctgcctctcaggttcaagtgattctcctgcctcagctgggattacaggagcccgccaccatggcccaactaatttttgagtttttactagagatggggtttcaccatgttacccaggatggccttgaaccttggcctcaagtgatccatccaccttggcctccgaaagtgctgggattacaggcatgagccactgtgcccggccacatttattttaattcagagaacaatttttcagtaaggttgtacaaatgattgtcctacattcctgcatgtttgaaactctttttctctttttgtctccatatgtgaatgacagtttggctaggtatagaatgcttggtttacactttttattgttcataaatctatagtcttatctttgttcccatcctctataccagcttgagtaggattagagtgtgggattcacctataaaactctatacccattgaacaagtcctcttttccccctccgctagtccctggcatctgccattttacgtctctgtttctaagagtttgactactttaaaaacctcatataagaaggatcatgcagcactgtgtttgtatttttgtgactggtttatttcacttagtatagtatccccaaggtttatctatgttatgacatatgaaaggatttcctttttttttaaggctgaataataatttattgtgtatataccactttttaaaatccattcatctcttgacagatatttaggttgcttttacctcttggctattatgaataatgctgcaatgaacatgagatgaacaagctccttttttatctctttacttttgttagaagcttttaattcctgattaatgagttctgaacgtatgcagaggtctctacctggcagtgacctaaagccttgtcttctgccaccccactcagccttcagattcacgtctctagattcttgaggttgggaaatgtttccctagcagccatggttttgcattcattggccattcaggttttctgctttgccatcttcccccgggggtttccttatcctcctggaagcacaactaggcatttaagtccatgttgactgtattttacctgctatttctatgtgttttgcaataagggcttttcaagatacccataacttgtggctaaaaatgaggtttgttccaatgtgccttagaaatatccagtttcatacttacctggcagggcagataccatgatcttaaaggcagttttcccagggcaaggcttatccattccactctggatccatcatagggatatgctgatccctggaattgccccaaatgtgggaagctctactgcaaaatttttggtagtgagcgatggcattatgcattcatgtatgaattcaactgagtatccagtttcatagaaataataataacatcttctataaaatgtattcttgtgtattaacacatggggctctctagtactcctgctgagatatatgggaatctaccctagttttgccattttctcctaacatcagtctacttcttttaatattcattgcttctccccatttctgtagttcagtgcatgttcctttcctctgcaggaactatttctctttcctcacccaactcataaatccctgcctcccaccctaagggtaggcacatgacccaacctgggagatcagaatgtcacacccccaatacaggattggtttgtgagtaggcagatgattctgtccatgcacagaactaagtagaagagagtttttatacctcagcttagcttgatgctagcagagagctactggagttctatttcctcctctagggaagaaaaggattttggtttggagataaagccaagataccaagaaagtgggaatgaaagacttagagacagggagtcctggccccttttcagatgctcagatgctggcactagcttgaggcccagttctgcttctgctcttcccaacagccccttttcagatgttggcactagctggaggcccagctctgcttctgctcttctcaacatttgttaaggggagctcccaatttcttttctaagatagctggtttgacttggatatccatctcttctaatcaagggtcctgattccttgtcattgtcatcaaaaaaaatttgtaaatatttcacttcttgctgacatgcttttggtgttgaacaaagtgatttgcacagatacaatctctgcatcttaatagcttacattctaagagctgtacacctggcactctttctctggaactataactgctacattcaagaatctttattaataatacttttcagatatatagttaaaaaataattttaatagttgaaaggcatccatctttccaagaggtttagacatactgcaattgagtgctaagtgacttttagtttgtatttttgtattttttaatatttgtatttccataggttattggggaacaagtggtactcaagatggatgaaggacttaaatccaagacaagaaactataaaaattctaaaagacaacattggaaaaactcttctagacattggcttaggcaaggatttcacgaacaagaacccataagcaaacgcaataagaacaaaaataaatagctgggacctaatcaaactaaagagcttttgcacagcaaaagaaacagtcagcagagtaaacagacaacacacagagtgggagaaaatattcacaatctatacatctgacacaggactgatatccagaatctacaatggactcaaacaaattagcaagaaacaaacaaataatcccatccaaaagtgggctaaggacatgaatagacttttaggtatttgtgtgtgcagacctcttggtgtcaaggctaaactgttcctttctctgacacataggaaattgatgcacaataccttgcagtgtataattccaggcccctaggctttggagactgggttatcttttcactcaactgacagttgatacattgtttgcactgaaaaatctggctttgttgaaccacaccagtttatgtttttaattccaaatgttaccttgttatgaactatttttttgtcctttcctctagagaaatgctaatgctgcttgcttacatggaaagtaaagttaaggagttggtgttgacattttggcttgctgtcacaggcaaaaaagagtagtgctgtttttgtgtgtttaattttctttcactttccccactctgtgtattggtggatgcctttagcaataagtagtccttatccaggtcactcactcattaaccaccaaccactgacagtaatgtctttactagatattttgcttcttttgattaatttgtctctatttcctttgttctaaagcctatagtgagtaatcatatttggagtaatagcagagctccctgctgtgttttcatttgcttaaatcaagacttagctgatgtattgaggaaccaagactgagatgtggggctaggagggcctagggtctgtcaggcactcttcagtgacttgaggtgctgaatgactcacactgtactgggagatgaccacctgtgtgcatccaacactgtcacagatgtgccattgagccaccaggagcagccacagaccatcagtggttgtgctttggaatacgcaattttgtgtttctggtaagctgtaatcttttcttttcccgtatgattatttttcattgaattatgctattaaaactcatctttgggtttcttgtaacgtcattgccgagaacattatttttgcatttcacagtgatttcttgaggaggaagtaagaagtaattgttttctggactcactgtctgaaaaacttgcactttactgaagcgattgttttatttacactaagtaacaatatgagttttgttagctttttggatggactacaaagcataaaaccaactttgttcctcatctctggcaaagatggagggttgttggcttgtgttgtgtgatgagtcttatacctggctctgtctgctcttgccttttgccttacatttcaaagacctcacttttttttttctttttttaaaaaatattttatcacgtgattttatatacattttaataaaatttcttttttgtaaaaaaagcaaagcataaataaaatagggtagccatttcttctaaggttatgttgaatctaacccaaactcttatcagagaaaactcttctttagatgtagcctaaagcaggaagcaacaaacctgtatacagccaaagtatcatctcaagggcctgcattcaaatctcacacatgtggcttgaaagtgatctctttcgcccttatttcaaggcctaatcttaggttacatactgcttaaagaagcttcagtatgcaatttcaaagcctgtagtagatgtaaaatgagaaaattagaaataaggagaaaagctgctacatgaggacactgacagcaaggaaagggagagaaaaactcacaaagtaagtggaaaaatagaccaatgcaaataaccccacatagtttaacagacctcatcatatctattgtgtacatgtttgtatgacatagattatatctattatatgtaacccagtgttcatagtgttgacttagaaattatcaaccaaattcaaagcttttaggctttgaaaattgtttgaaaagattttcacccaaaatatttaaattattaaaaaaaattattgttgattaaagttgtaatcctcaattaattagaagttttggctatccag

SEQ ID NO: 205 - DNA, 8367 bp, synthetic construct
  misc_feature 1..8367: note = Description of Artificial Sequence: Synthetic polynucleotide
  source 1..8367: mol_type = other DNA
agcagcaataaacaaaacagcagcaataaacattactgtaagtataatccaaattagtttattgcaagacttattttaattcaggtaagcaacagctctctgctatcttgtgagacttattatattccctgaaaaattatagatattaatattaattttatttaaatataacaaagatttgccagtattcaaatgtctgcaattatccttaaaatgcacagaacctatgtttaggtatagtatcactgttcatccagccttcattcactctaatctactcttatctaaaatttgtactgtaagtaaaattacattctgtatgacagaaagcaaattataatattagaacaacattatggaaaattggcataacattgtacaatcacccataactttattatttatcattttgtaacttttttattatattagtcaaaaaatctaactgtacttaatagctaatacatatattatttgattttttaaagactattattaaaataataataatttgggggtgagaaggcctattgaaaaatgaccaacatataaatcataaataagtttgatgcaacaaatatttgtgagtcttatagttaaaaatgtaaaaattcattataaacaaagctaaaagacaataatatgcattgggaaatatttgcaacatttacttcaagggttgatgtccttaagagaatttttacaaattaataaacatttaaaaaggtgaggaatggcaatagctatgagagacaatttacaaaaacataaaaaatatgaaaactgtttaatctgtaagtacatcaataaaaattttattatagtagttatgttatctattaaattaggaaaggtcaatacaattggtaatcttccaagtaaatataggagagaaggtctttctcatacacttataagaatattattttgttagaatgcaattaaataaacacttggtaaaaatccatatcctttgtccaaacaatttaagttctagacctctagaatccacatgtacatatacatatatacatacatatacacacacacattcacacctatatattaacaactcaaatccaactccaactcttttgtaagtagtattttgtccaacaaataaatttatctagctgcacacagagcgcccagcaattctacgtgtaactctacctctaattcctttatttgcatttatttctgctttcaaacccttatatgaggcaagtgggattaatttatttcattaccttaactagattcatcgctttactttgtcaaactctgattgatttgctcaactcaatcttgtgtgttcaagaacttaatgtggatttctgttccacctcatgaaagtcttttccaaaaacttgctaaattcttgactcaagacattccagttagtaatgcatttctctgctcaaatacaatagaagtgtgctctaataaatactcttcaacaatgtgcagttatttctccccaactatcaattccccttaaagcagaattttactaaaaatggctttatccttctggggataatcagtaaaatggcaattggtgggcgaattaaaaatatattaaaagcagatggcagaacatgagtgcagatttttactacaaagcttaggaaaagcaaaaggaacttgaatagagaaaatgcagaaaagccctcctttggctattaggacggagagagcagaagtatgtttagagcttcaaagagtctgactctttgcaactgtttatcttaggactttaaggaagtaaaaggtgcaagtgaaacactctggattataaaatagaatctgacacagaggattcaacccagttaatatgcatgttgcttacatggaaatgctgagaaatttttagcaaatagatagaaaatgacagatggtaggtatatagaaaataattgtaggaaaaaatgtaaaatgaagatttatggtattccttttatattttattttgttaatatgttgcccataatgctttatttcaaagaatgcaaaaccaaaaaagtagttccttcctaacttcccctgcagccttgtcttgtggagcttgtattttacttcatgagaaatgccaaggagatgtcatttaagctgaaaacctccagcagaattagccacaatatttgggaaaaagatgtttccagaaaaagaaagagctagtataaatgtccttaggcaagaaagagctcacgatgattgaggaacaacaacaaaaaagattatttcactcaagaaaagtgaattgggagtacagatacaaatgatgaggtctgaatatgattcatggggcaggtcacactagggtgtttgggtatggtctaaatgaatgcgcggcatgagttgctttaaggagaggagtgacatgatttgacaagttcttaagagatccctttgattactctggggagaatagaacataaagtagcagaaatgaaagcaaagggagatagtaggaaataattgcacatttataagcaagaaatgatgttggcttggactctggttatagcaacaaataaagaaaaaaggaaatactgagaagagttgattggatttgctgacattctcaacataaatggaagtcagtatttttttctaataaatataatatgcgtaaatatttttaaatatttaattcttttaccactaatggggcacgagtagacttcagggaacatgccagtacagaaacatataaatgtgatcattggtagagataggaattaataggcatttgaatctctccctcaacctggaataccacaaataaagctctttgcttttcatgttgcattgttatcataccctatagttttctgccattttcagttacttaatattatgttttgcctcaatagattatagtgctttctcttgttgtgttatatttgcagcaattattagtgaagttttaaacttcaatatcacatctaaaacagagcaaaattgttgcatactattttccattaaaacatgagaccactatgacaaaaaaagctaaacgtgtcatgaaatgacttacattggatgaaagtatatgcaatatattaagaaataatctctgactttatagttttttatttgtagtttttactagaacgtgaaatcaatatgtgaaccctggctggagtttgcatctaaatgtaataaaataaaagaaagtttaatattatcattgaagcattaatgtacattagcgagctggactatataaaataaactttattatatttagcatttgatttttatttatgtatattataaaatgaatatagtttatattataataaaaataaaagaagtagtatgttaactaattagtataagatgcctacaaactacatatctgcctaaatttttgacccatgaaacttcaatgatttgtgttaatgttaaggcctacatttatttatatatatatatatatataattaggggaggaattgttaattctttcattttaaaaattttaactttgcagacaaagttgactatacctgtggcagaacactgcaacagctataaataaataaataaataaataaataacttttattttctgtggagctcccagaattatgaattattctgtagattgagatttgccaaggtccttttcttagagttgcaagagcataggagaaagtcaagggaaataataagcagcacttgatttcctttaccacagtggatgggcttctaaaaccaaattacctgactataaatccagatctatcttctgcaggctacgtgattgtggatgttacctcttctgtgcttcaatttcctcatctgtaaaatggaattatagcctaccctattttgtagtatagtgaggataaattgagtgaatgtatgtagttcctagaatagagcatgacacatgataagtggtcaataaaatattgtttactactagttatgtgacagtcacttcacacatagtaatgatttaataaaggagcaagaagaatgtagagcacagcttctcaacatcggcactacgacattttgggtcagacaattatttaatgcagagggggccataggatgtttagcagtgtctctggccagtagtgtacctcctcctctccaagttttgacaattgcaaaggcttccagacattgacaaatattccctgaaaagtaaaattgtcccggcttgagaatcacaaatataaagtaaccactcaaagattacattactaattttaattgaatttgaccagcattatgaaataagcataagcttaagtttctacccttgattttgtcattgtcagttagggcagcagagaactccaattctgaaaattctgaacatgtgctaataccctacaatataatcaaaactttcatttttgaattgtatttcttaaaaattagaaaatttattaagcagcaacatggaataattaaccacaaaaatgttgaacataaatctcatttgcctaagttctcttttgaagtcctgtttcactatataagtattatgtgttttgtttcacagctagataacagccagttttttctctgagcctaaggttgcttctcaaatttatggtggcttatagctcttctaagtttctataaaacttcagcaacctgcagcaggttgaaatttattgatattgagttattcaccaggtcatattacaaagtcagggattgactcacccaaaccagatgctccccctgccaccagatcactaggagatattgcaatcatttcccctggttactaaattagcaaaaattctcagggagagagaagggcaagatggcacagtttaatacttactattattcttttattctttaccatcattccctttgaatggattaagaatctgacataaatataacttgctaaagaaagggtgttaggtgagagggaagtcatattggtctaagaaaagtcttagagaaatatttgaaaagaggtagagagaagggttggattggagtgggtgggtggggaatcacactaaggagatggatcattcataatttctttagacatggtgaggcagccacaggagtctgaacttgttgaaaccctagtctgaagccaataaaagtgctcaataaggtcacactttgatcttctctgcctaaagcagttattcaccctatctttgggagaggaaacatctacaaacctttgttctctttgttagcagagggatgacatgaatttgggaaaaacgtttgagagacaaaatgagatttagctcgagcaagtgatcgacttgtgctgggttgcaaatggactttttcaacaggcaggttgaaactgtgcttcagcaattaggataccagatataaacatccatgcacagaattggaaaggttcagctttcatggttgctatggtttgaatgttccctccaaaactcatgttgaaacttaatccaaaatatgacaatatagagaacgagctttttaaagaggggattggatcatgaaagttcttccctcatgagtggattaatccattgataagtcagtggattaataggttatcttgggagggaaaccattagatttataagaaggggaagatagacctgagctagcatgttagcatactcagccctcttgccatatgataccctgtgctaccttgggactcttctgagagtccccacaagcaagaaggctctcaaaagatatgccccatcgaccttggatttccaagccttcttagctgtagaaaataaattcagttctttgtaaattactcagttttaggtatactgctataagcaacagaaaatggactaagacaatggtcttatccagaactttgtaaactagaattggctgtttagattcagtatgtattttttttatagattcaaaataattttgttttgaactgtacaatgaaggagtgtcataagcttttccacatgtagaggctctaaatatcagtctggcattgtgataaagcagagagtttaaacccaatcctatttgtgccccatgaccgttctttctggttacagttcagaaaagtaggaatggatgtgtaactcaaggagaagcatataatacatgaagctttttctcaaaattttgatttagaaaatgaggtattttagtatgttaattataggcatctcaactgagaagtctaatagcattgggccagaattgtcgcagcagtccaaagccatggataaacttaagttaaagggagcaaatactaacagccttccaaattaatctgtattggagaagatgataaacagatgaatgggaactagaaaccatgcagacttggaactagatataaaacaaacagctatctaatgatttcttatttactctgagcccaagatatttttgtatccttttagttaaacctctgttttactaaggaaatttaaataagattctgtctcttgcaagaaaataacatctaagacatcttcgtatttaatactgccttaattttgtttacaccagtggtccccaacctctttggtaccagggattcgtttcgtggaagacaatatttccatggacagggttggggggaaggtttcgggataaaaccgctccactactcagatcatcaagcactagattctcataaggatcaaactagatcacttgcatgcgcagttcacagtagagctggtgcttctgtgagaatcaaatgctgccaatgatctgataggaggctgagctcaggagtaatgctcactcatccacctctcccattctgctgtgtggcccagttcctaacaggcccggtaccagtttgtggcccaggggttgggacccctgttttacactataacatctccacacgtctctcatggcctttcagatccactgcttgtctcaactcaagtccagctacctgaaaattcgattattttttcaaagtgaatttgaatatctttatgttgaatacacagtctccacttttacgcagcccctactgtcttctatcatacctctctagccctggaagagatcaactttacattcacttttcctgttttagggctattattttatcttcaattaccaaaatctatctacatttagatactttaacttgcaaatacatagtaaacaattacggattatttaaaatagcagttttcccatgagtataaaaaaaaaagaacaataaaagcaatatttgttgagtattttaaagtgccaggcactgagcagtgtgctttgcttaagtaaatgtttgacaaaataaaaggtcttttaaaagttccatgctttaacattaataaccatataaagataaggttagactttctatcaaattagcagttttgtgaagataggccttttctgctatatagaatctcctcaaacctgagtgttcgtattatggattatctagtatactccatagctatcaagtttgtgtatgtttctttctcaagcaagttatcttatttctccttatttcttcagacttatcctttcttttcttttcttttcttttttctttttttttttgagacggagttgcactcttgttgcctaggctggagtgcaatggcatgatctcggctcatcacaacctctgcctcccgggttcaagtgattctcctgcctcagcctcccgagtagctgggattacgggtatgtgccaccacgtccagctaattttgtatttttagtagagacggggtttctccatgttggtcaggctagtctcgaactccgcccgcctcagcctcccaaagtgctgggattacaggcatgagccaccgagcctggcccctaacctctcatttctaaggaaatgacaaattaagtcttttatgcaaatacagtgtagggtcatttaaaaatattttttgtaataggtgtctctgtacataaatctatttaattttttctcttttacagtaaaaaggcaatactgtgttttagtttcaccaaaaatttcagtagaccaattgtgtaaagggatacatttatatgaatttttttgacatagtaaaaactaagaggggaagttattcaaatatttcagcataaattccctttccttgaaattgcaatcgtcatgtgtagctacaattcctcagcattcctctgtagtataagtagctacaattcctcagtataagaaacactaaggtggaaaattaattgttaagagaacaaagtcataacaaaacaacaaaacaaaaaagtaggatatagaaacattaactcaatatcactcttgaagctcacataagagaaattattgtactagacactgtggttcatcatccagaccccatcttcatgggaagacatcgatcccacactcatggggaacatcagcagctgacaattcacacctgtacc

SEQ ID NO: 206 - DNA, 3128 bp, synthetic construct
  misc_feature 1..3128: note = Description of Artificial Sequence: Synthetic polynucleotide
  source 1..3128: mol_type = other DNA
gcgctctgtgtgcagcataataccttgtttaacctcactgtggttatttaacccttgaatagttgagggttgttttaatggtacatgagagtcctgtgtcatttctggcctgtctaaaacacaggtgcctgtggccgccaccacagtgcctggttaaggcagggggaatgcctttctccctgctccttcaagcccctgtgactgttcgcttggggctgtaatgaagttttccttaatggacattgatacttggctaatttagtaggctctctgtctgctgaaacaggcaagttattttacccccacgtattttctctgcattaaaccgtgaaacttggctttgtcattttctaacatgttttaggaactcattgaaaaacacacatgtgaatgcgggctttctagacttgcatactgcagttcacagtagaaggccatcacccctgtgttcctagactgtgtaagctagctgagggcacttcccaaatctcccaggaccctcttgtctgcccaggctgctgcactggccgtttgccagtgcttggctgtggagtccactcacccttcgagcccaggatttgaagactgcagctccagtgaggccaccacgcctgtcgccgtgcagcacatccgccctgccagagtgaagaggcgcaagcagtcgcccgttcccgctctgccgatcgtggtgcagctcatggagatgggattttccagaaggaacatcgagtttgccctgaagtctctcactggtgcttccgggaatgcgtccggcttgcctggtacttcgttttcctggcctctgcttgtacgtgtgtgggttcccgcttcagggctgttgactcacagtggctggtgtgctgtgtgtgcctctcttaggtgtggaagccttggtcgggtggctgctggaccactccgacatacaggtcacggagctctcagatgcagacacggtgtccgacgagtattctgacgaggaggtggtggaggacatggatgatgccgcctactccatggtcagtgcctcccatgtgaccgcccgcacctgggccgctgtccgtctagcgctctaacagtcttacaccttggctttctctgtcccttgaaagaattaactatatctactgtggactgtttcataaaaccaacctatggtgttgccgggcacagaacaaagctgtgtttcactactgaagggatgattgggtttctatatcataattacttttagcttcagaacagacccttgttcaaacatctcatgatcttcggtagccattagaggatattttattaaaataccatgttttgacacatcagtttctgacctgagtaaattattcgtaggattaatttggaagtgccttggaaattttgtatacttgtagcttttgagattcatttctgcctactatgctactgctattagtcttttttaaatgaagatttttatagagaaaataaaggatttcatcctttactttttaatattatagatttcacagacatttctttttgagtagatttattgagttctcctatttttttttctttgaatgtatttatttcttgtagtctactggtgctgttgtgacggagagccagacgtacaaaaaccgagctggtttcttgggtaatgatgattatgctgtatatgtgagagagaatattcaggtgagtaattgtcttaagctggagcctcgatccgtttttcactcagcaaatatttgggtatgtcctatatgccaaacatcagtggacagaggcccctgccctcagggagcctgccttctggtgctggaagacatacctgaccagtgagctcatggtacgctagaaggtgctgtgtaccctggaatgagagagagcagactacagtaaaggggtgggagtgagggcacagtccagggatcgggatctgcaatgagaaggtgagatgggtgcaaagcctacagggtgtgaagggtggctgagcaggatgggcacccagacagaggctgctgtggctgccccggtgtagccagaggacagaggggcagatgggctcaggggcagccggagagcacaagtggcctgtccacggtggacatggcgcagggatggctgttttctactagccccacttgtgacacttcctacatacctttccttgtttttcttatgtaattctcattgccatcaaactttaaaaatctaattatgttttatatagtcctttatctactttaaatcatttcttgtcctaattctcttgttttagtatattttagagaaaatcccccaaatcatctcatttcacctgtatatatgtcagtgagtatcactaataaagaatcttaacataatgacatttctgtttaccagcattacctaacaaaataaataataattccttaatatcaaatgtccaagaaagggttcaaagttcaaattggctcataaattttataattctgtaggatttgtttgaattttcaaacaagattctaccattgaaatcccttttggctttcattgctgtgtcttccttaattttgttagtctataaattctctctatcttttccccccttgcaatttatttttgaagagactaggttgtttattggtagtctaggtatacctatagtctaggtatttgtcttagcctgtttctgttgctataacagaatatctgagactgggtaacttattaaaaacggaaatttatttctcacaattctggaggctgagaagtccaagatcaaggtactggtaggttagatgtctggttccatcatgacgccttctgtattctctggagaggaggaatgctatgtcctcacatggcagaaaagcagcaagaagagaacctgtgtccctcagaattcgtgtttcaaacacttaatacccaatgcagcattaattcacttcccaacacttatgcattgggtattttttaaaacatgaattctggggaacacagtcagactatagcagaatttcttattaaacttctgtggttttgtttaatatgttcctcttcttttgtatttccccagcataaacagttggatgaaatagttggatcagattcaggtttaatttttttttgtggggacgagattgtttctgctgcacacagagcgc

SEQ ID NO: 207 - DNA, 2959 bp, synthetic construct
  misc_feature 1..2959: note = Description of Artificial Sequence: Synthetic polynucleotide
  source 1..2959: mol_type = other DNA
gctgcacacagagcgccagaagaattgtattttaaaatgtctaaataggttgctatttagtgcaattttttccagctcttaaagcaaagaaatgacaatttctaaacaaatgatagaagttaagtcaactaggttcaagcctaaacaaacatttttatcttagttcaatgctataagtgtatattcaatgtctgttatgtttaacacagtgggaggcagaagtgagaatgcccttcagtatacattgaaataaaaccattgcaaactgcctcagaaggaattgagtagttaattaataagcttttatttaaatgttgcaacccataaaaaagcaactcagcatgaacttgaaagttgaagataattccagcaaattccatgaccccagggctccagcaattacacaaaattaagagataagttcatgttaatgggaaaaaaatgaaaacaattatcaacaggaatctgagaaaataaactgtggcatattcagacaatataacattacacaatgaaaataaatcaactgcgactacatatgcaagaatataaatattatcaataatgttgaatgagcaaagcaagccaaaagactatatactacttttgttgagagatggtatcttgctatgttgcccaggctgaactcaaactcctgagctcaagtgatccgcctgactcagcctccccagtaactgagattacaggtgcatgccaccatgcccagctttatactaccatttttaaaatacaaaatcaagcaaaagcccttaatatgtaccttagatatatacggcaaactatataagtagtatatataaagtaaactgcctttttacttatacagtaaagattttttgaagaagcatggaaataggaaacaaaaaattcagcatagcagttggggaggaaaattagtatcatgttttcattcttaagctggatggtggctttatagatatacatttattatacttcatgacttacatattgaaatatgtagccattttaccattaaaattgcagtagttcacgtccgtaatccccacactctgggaggctgaggtgggtggatcatctaaggccaggaattcaagaccagcctggccaacatggagaaaccccatctctactaaaaataccaaaaatatatagcagggcatggtggtaacgctcctgtaatcccagctactaaggtggctgaggcacggcaattgcttgaacctgggagacggacattacattgagccgagattgcaccactgcactccagcctgggcgacagagcaagacctgcctccaaaaaataaaagataaagtaacagaagttactacggcagaaaacccattctctattcttgtatgaacttttctcagcctggggaaaggctttgctttggatgttgtattatgttccttgcttctttaggctgcttctaaagaggttgaaaacctgatactattttctcttctttaggctatgtccaaactgggtcttcggcaggttacaggagttactagagtcactatccggaaatctaagaatatcctctttgtcatcacaaaaccagatgtctacaagagccctgcttcagatacttacatagtttttggggaagccaagatccaagatttatctcagcaagcacaactagcagctgcggagaaattcagagttcaaggtgaagctgtcggaaacattcaagaaaacacacagactccaactgtacaagaggagagtgaagaggaagaggtcgatgaaacaggtgtagaagttaaagacgtgaaattggtcatgtcacaagcaaatgtgtcgagagcaaaggcagtccgagctctgaagaacaacagtaatgatattgtaaatgcgattatggaattaacagtgtaaccatctgaaagcaactttttttggtgtctcaaaggagtaactgcagcttggtttgaaatttgtactgtttctatcataaataaagttatgacttcttgctggaaaaagaaaagaaaagaaatgctctctttttttggtctccaagtgccgtactctccggatctaccttcttccctggcttattcttcagtttcctttgtggtcatcttttcttctacccagttcttaaatattagtgcatctcaggggtctttccaaggccttgtgttcttttcactctgcacactcaacataggtgatcagattcatttctcttgctgatgatcctcaaatagtttcagtcccatctttgtcctaagacacagatttggatatccagccacctacttaccgtctttccttggatactctcccggcacctcaatcacaggatagccagaagtatactcatcatctctcctctaccggatgactagagctccttctccagtgtccccagctcagtgaaagtcaccatcatacccttcattcccaaaccagctactcgatactcatccttagctcttccctatcctttaaaatctctggcacccagtaaatcttcaagtcctattgctactgcctcctgagcatttctcagattcatgcacctctctgtgtctctactgccatcatcctctcccagattttcctaataacctactaaaccgtctctctacctccagtctctcttctgtccgatccattctgcaaccagagttgcatatcccttctttactgtatgagcaactgaaatagtctgaactcttcatgtggcttattaggccttgtatggtctggcctctgacagttttctgctattcccctaaatgctctggtcatactgaacgtctttcagttcctgcaacatcacactcccttgccctcaagcgtttacacatgctgttccctctacctggaacattcctagtcatctttcaaatctcggcttcaaaatcatttcctcaggaaagtttaccctaatccctagactagcttaggtctctctgaaatatgttctcattacgc

SEQ ID NO: 208 - DNA, 2732 bp, synthetic construct
  misc_feature 1..2732: note = Description of Artificial Sequence: Synthetic polynucleotide
  source 1..2732: mol_type = other DNA
cttatcagttagctcccacttataagtgagaacgtgcaatatttggttttctgttcccgtgttagtttgctaaagataatggcctccagttccatccatgtccctgcagaggacatgatctcattctttttttgtggctgcataatattccatggtatggatgtaccacattttctttattcagtctatcattgatgggcatgtaggttgattacatgtcttttcttttgtgaatcatgctgcaataaacttacatgtgcatatgtctttatgatagaatgttaaatgcaattctaattctcatggtaggaatgtaaattgagcagtaaagaaacagtataaaaagcagattcttggcatcttatattattaaaataaggactttcttttttgaaatttgtcttttcctatatagttttccctgatttcttcatttgcagactgagagaaatgctgatgttttacctgatttcataaatgttagctaatattttcattgtttcagttcttattattgcaggtgtattttgtgcttgtatttttatgaattacttaaacataaatatttttcatgtcacatgataattctcagatacatgatatctaatggctatgtaatattctatcctatattatgccatttttatttctttcatctattcattcatttattcattgaatcatgctttctaatcgaggtattacagaaactgcttgaactcactttgaggaaagtaagtctatatgagatagaaagcaataacgcaagccaacacatgcataaaatgtatgattgaatatgttcattattttatttggcaattccaccaaaggatatactttttcttcctcacatgtttaaatatttcatagtgaaaatccttctgttttctcatatccttgagtcttaataaaataatatttaccatggtataatgttaaaccaacctacttttctttctcttttcacttactaatttatttcacaatcagagaaacggaaatagaaaagacaaagttttctcatttggtctcaaattttattaagaattatagagatgcaaaaagagctttgccttttattggcaaatgccagttcattgaccctttcacactgtaaagaaatatatcaaaaattgtcccttttgacgtgagctcatctctttaaggtcaccgagttctatggtcatctgaagcctcaattaaaaggacattggtaatagtaataacaagtcacttggcttcatctaaaatgtgccattgagcgtttcagtttgaaagagtataacgtgagtgttttgtgttatgtccttgttggcttctccccgtgcctgtcctacccctacagatagagctgcctgacaagtgctgctcatggtgattagccatgtaaatgagtacagtcaggaagctgctgtctccaaaatgtgcatatgtaattgctctcaacaatgcatatcaaaatcccatcagaaagcaaatcatttgccatctgaccttccattaattaattaaaaccccatatgggggcagagggaagtggaaacaaaggataatgtcacagtgggcacttcacagcagaactaggggatccctaccaagccttttttggaaaccttatgtctaaattctgggcatctggagaatggtactggataggaattaaaaaccttgagctctagctctagctttagccccaagaggctgagtaaccttgggcaacttacttcctcccattgagaactccttggcaaataaaggtctatgaattccattaggcttttccaactcagaaattccatgtttctcccactgggctatcaacaaattgaaatgaagagaatcttaacttttctcaaataacaagttatggtttggtttttgttatttttctttcctttccagaaacagggtcttgccctgttgctcaggctggaatacagtggtgtagtcatagttcactgcagcctcaaactcccaggctcaagcagttctcccaactcagccttccaagtagctgggactacaggtgtgtgccactgtgcctggctaattttttcatttttgttttgtagagatagggtgtcgctttgttgcccaagctggcctgaactcctggcctcaactgatcctcccacttgaacatctcaaaatcctgggattataggtgtgagccacagcatccagccaagaaaataatatattttttgattagtgtaaagtgccatgcaaatacagaggctcatgcctcttctagtaatattactattccaagacacacccatatagaaatgctggagtcactactgggtgtcaggacagaccatgtgcatatgcacgtagtgcgtacttgtacatgcacaaaaaaaagctctggtaaaatgcagattgaactagtgggtgacaaatggggaaggagtgtgaggtacagaattggggaggagtgaaaatgacggtgatgggggttgttatccccccttcatctgttctttcttctatagcagtggttctcaaccttaacctgcatgaaaatcaccagagagcattcaaaaaatgcagaagtctaggccctgccccccaaatattgtgattgaattggcctgtggagtgggaggtgtctatttgtttaagttttccaggtgattctgttgtgcagccaaacttgaaaaccactattttataacagagaagttttagctgggcacattgctatcctgctgcacacagagcgc

SEQ ID NO: 209 - DNA, 2723 bp, synthetic construct
  misc_feature 1..2723: note = Description of Artificial Sequence: Synthetic polynucleotide
  source 1..2723: mol_type = other DNA
gctgcacacagagcgcccattcattcaacaggtatttattgacccccctgctctatgtcaggccttgagctatgtggaagactttgtgtttttggagccaagtactccagtggggggtagcaggtgggagagagactgacaataagtaagcaaacaaatagaacaacaagataattccagaggctgcagaatataaagtgggcaaagtgagagagaggggcagagaggaggagtggagtgcatctctatggaagtgtggccagggagggtctctgagaaggtgccatttcagcagagacctgattgaagagaaagtggcaacagccgtagggaagacctggaggaaaagtgttgtggacagagggatcagcaagtgcaaagcatcctggggggaaatgagctggatgtgtttccagaccccaaggacaggcaatgcagctggagccacagggtgtggccggaggacataagtaggggttggagtccgagaggtgggcagggacccaacccccagagccctggagcaaggagaatctagaatattgcaagagcaaagtgaagccagcggagggttcaggagggagtgacaggatgtgatctgcagccgaaatacattcttctggctgccacgtaagatgactgggtaaaaaaggggggggtttagggtggcagccaatcatttttaagcccgtttcagttccaaaatcctgtagtgcctcgcccctttcctgttctacaacaacactaaggataatctctaacatttgaagggtgttttcaacgtttacaaatcacattcgtgaacaattctgtttcattctcacagatgctcctttcaatactctcccagggaagtggactcctctgaccacctgcagggcagccccagagtggagcctccagggacctgggaccttcgagtgctctgctcgcagggccagtcggaaggctgagaatgccatttgtctggcggtgaacatccgttgtctgccagccagggtcccagaccccctctttgggtagtggtgctcccatcttcctttgaagaacctgcaccaccacctccatgcacagtctctgtggctcagatgaagccactgtagtcctggctccagggtggccaatcagagtttcccaacatcctggcttccacagaggttggttcaaattgagtcctccatttgtaccagtgagaaccaatcctgaggctgaagcctgggcttacatagaagatgctccctttcaggtgggatgggccacatggcagggtaggggccggaagggctgatggccagcaactggtaaaagcctgcctaagcagggagcccccacagaggagggctgacaaggagataaggaaggagagacttgttctgttggagcacccagatctggccatacctgaagccaaacttctctcaccctagggactcttcgatgacaagagcccctgaattcccctttgagtttgagctagtttgagatgcatttctgttccttgtgactaaagtgtcctgactcacagaaaccaaactatatcaagcatctgacatggcaggagctctttgtccttaaaaccccacacctgcaccttaagaaagaccattgcttctataggagatgtcatgagagaatgcagcaacttcaaactgtctgaatcgaagttacatgaggcccgcaggaagagttttacaactaaataagtgcaacatttgggtttccccaactgattctgttctctaagcttcttcattgctgcttctgctctgctatccttcatctagcattgacacttgtgtgctgagatggaggagcactggactgcgcgtcctgattctgcccttccgcagtcacatgatgtcagccaaaccatggacctctctgagagtttattttctcatctacaaaatagcgatagtacctatttcaatgagttgtctctggcaaatagtatgcactaagtacatgctagttgatgttaattgtactattattattagagagcagtgcatgttaagggatatggagtaagaagaggaagatactcctcctgctctgggaggccaaggaagatttcgggggggcggagtgggatgtgaagaacttgaaccttgaagattcacacatgatcagaaggaagtggcataaacaaagactgttctggggccagcaaagagtttatttgggttgatttgacagtttggagataaaggtctatggggcccagtttgtcaaggactatgctctctctgtaaggtttttgtcctttcaaagcaaattctgtgatatgagaggccaggcatccatttatcaaaagattcccttgcaaatattgtcactgtgatccacctgtcaagcaaaaagccagggcacataagaaggcgcacttttctcttttgtcagtaaggttgagtggctcaatatgcattcctcgaaaagtatattagaagaactttctatgtctgggagcatttacttttgattaattttaaaatagtaatctttatatactatagctctctttcgtgcaaactgaggagatggggagaatcttccttttctaatgtgaaagatatgcaaatgcagggccctaaaaaaacacaaagcatcaaatagctcagaaatataccgatgcagagggaaaacaaagactgtttccaaatagctcaatcaaaagaaagtttcaactctgtgaagtgaaagcacacatcacaaagaagttt

SEQ ID NO: 210 - DNA, 2682 bp, synthetic construct
  misc_feature 1..2682: note = Description of Artificial Sequence: Synthetic polynucleotide
  source 1..2682: mol_type = other DNA
actgtcctctttctgttccaccacaaagcttcttgtggctttgtttttcgtgagaccgtctagtccctccccaactctgctttgaggtgttatttaaacaatgtaatcgggccaatctgcttctcataatgcctgactcattctctgtcttctacagtgtcaagtccaagtagcatgtctactgttgggtctgtgctgcctcccctcaatggctcacccacacccccacacacacacacacccacacacacacaccccacccatgctgacagatcaggccactgatgatttctggaaaatgtcagcttcctagggtggcatcgtccatacatataatgcaagtcacgtatgtaattttacattttctagcagctacattaaaaaagtaaaaagaggccaggcgcacctgtaatcctagcactttgggaggctgcggcaggaggatcaattgagcccaggagttggagatcagactgggtaatgcagtgagatcctgtccttattaaacaaacaaacaaaaaattaaaaataacaattcaaaaattctcatgctgatcagtaatgggattgtgcccgtgagtacccactgcacttggcaacatagcaagactctgtctcttaaaaataaataaattaaaaattaaaaaaacaaaatgttctttatggttacaactatatagtaagagtataaattctggagtctaggagaaactatagctttgccacttcctagatgtatgacattggacaagttactttacttctctgggcttcagcttcctcaactgaaaagtggggataaaaatcagtaccttcctcatatacttgttgtaatgaaatatgcatgtaaaatctaaaacagggtctcacaaactaagctcccaataaatatgagcttctatgtgtgatatatacacacatgcacacacattttaaggagaacagagaaaataactggaaggcaacactctcgaactctattggtggttatatgaagttggtataataccagttttttcctttccatatttccaagtgtaattaatataattttgataataaaataaggcaacagaaatcaataactgttcccacagtaaaaacacaatgtgcacagcattattagacattaggtaaagaagcagaaaggtctaactctgttgctcgggctagagtgcagtggcccaatcaaagctcactgcagcctcaacctcctgggctcaagcaatcctctcatgtcagcctcctgggtagctgggactacaggcacgcaaaacttaatttattttttgtagagacgggttctgtgttgccaaggctggtctcaaattcctggcctcaagcaatcttcctgcctcagcctcccaaagtgctgggattacaagtgtgacccactccacctgactagggaaggcttattaaaggaggggataagtggaaagaaggggcagagctgagaaggatagaacagaggcccagaagtggcaatgggcaggagagtggacaatggaaaggagagcaatgcagatgcaataaagggatcaattatgctgagctcagaagaggcaaatgactaaagaaagagtcttcaaagactaagtgggagaaaaacaaaaacaaacaaaacttagctttataaaataagctaccactataccataatgacctcacccgtgagtaaaattatatctccaagaaacactgtaaatgcccaaaatgctgcagtcctccacagaaaaaccttcttcttagtttctgattgatcaattactgtaactgttgctaaaggcactttagagccagaatttggtccgaattttatgtttatttccttcacatggcatggagatagcaccatgactaaacaattatacttctggcttttagaatcacagttttttattaatgatttttttaatactcttaaattcagacacatttctccgatccatttctacagcagaatctcctccattagaaatcaacttcattttcttagctacttgaaggactctagatagagcttcagactgggccactttatcttcagaggtacagcttcttttaatagcacttttgtggaaggtatttagttgggaacacagtattcctgagctacacaactcaatacgtatctcatttggtggcagttcatcttcagaactgaaaagttcttgagatcctgtatgttcttcaagacctttatcagagtttatgtgaatgcggctattttctgttttaggacaaacaggactaaaaagttcaagggaatatgcttggttttgtccactttcatatgcttctgtaaaaccatcaagctgaatcgaattctcttcaggtattcttatctccccgtaacttgcctttggttcagtctccatgtttacattccctttatttacaggactccgccttttatctttcttttgagctaaaaaagcaacctggctggaggtaattatacagagaaattccgtatcagttgacattttaaggtctgagaccttcttaactgctgcttcagaccttgacttatctactgagttcgaggaaaataatcccaaacgctggttttgtatttcatgatattctgttggcacacactctctttgtaccacttcaggccctatattaattttttcagtactacaaaccaaatccaacaagctgcacacagagcgc

SEQ ID NO: 211 - DNA, 2554 bp, synthetic construct
  misc_feature 1..2554: note = Description of Artificial Sequence: Synthetic polynucleotide
  source 1..2554: mol_type = other DNA
gcgctctgtgtgcagctccagggaaatgcaaattaaaaccacagtgagataccaccttactcctgcaataatggccatgaggcaggcggatcacgaggtcaggagttcgagaccagcctggccaacatggcaaaaccctgtttctactaaaaatacaaaaatcagccaggcgtggtggcgggcacctgtaatcccagctacttcggaggctgaggctggagaattgcttgaatccaggaggcagaggttgcagtcactggagattacaccactgcactccaggctgggcgacaagagcgaaaactctgtctcaaaaaaaaaaaaaacaaaaacagcgactacaaaggagtaaattctcctttgtaaaagtgtttttttacaatttagaaaatctcaaattttctaaattgaacatgaattttagattggaaatcatgcactctgctcatctgtagagtctaagttctcttcggtgaacctctgaccaccctcctcccttcaaccccgtctcacggcacaccttgcttcccacccggggtcagccaccgtctatttattcagttcactatatcgactgaatttctcaatagcccgcaaccttaccttgccggataaatgtatattttatgatgccaaataaaaatctccattttaaaccacctctgcagatggaaaggccctgtctttatgctggtaaagaatgtcacagcacataccattataaacgccacacgtaacccattcatctcctgaaatttatgtcagaaagattggaaataaaatctatattaacagcaagtgcttaatatcaaatgcggtattaaaaataacaaaaattttcattcctgtaatactaagaggcgctcttcttaactccatttaacagacacacagtgccacctatcagccatcctctgtaactgcaggtgcaaggtaaagaaccgctcatagacatgccttcccctctccctgctatttacatgccaaagaccaccacaggttaagaggacagccctattagaagcccctgctctttctatattgtgttcttgaaaagttttacttccttaggaactggagctttttactgctgaactgaacccagggactgcaatcccagcgaagtctgaacaaatctgtgtctaaaatacgggctgttatgatacccaacggtgtcctaggagaaatccaagccaatctccaggtccagccctcaacggccgcctgatgggaagagacataacaattaatggcaaatttcttacaaggattacccacacgtcttctttcctctaaccaccccctcttcggcctgcaactgctgtgatttggcctctgcccagcttctctcacaaggctgctcacccctgtgtggtgaacccaagggctacctcttgaccctcatcctgtgtgacctctcagtgccacttaacagggccccctggcttctagagttttctttctcttctcaggcgcccacagatgagatgaccaggataagaacataggcagggctgggcgcggtggctcatgcctgtaatcccagcactttgggaggccaaggcgggcagatcacgaggtcaggagtttgagaccagcctgaccaacatggtgaaaccccgtctctactaaaaatacaaaaattagctgggcgtggtggcacacgcctgtaatcccagctactcaggaggctgaggcgggagaatcccttgaacccaggaggcggaggttgcggtaagccgaggtcgagccactgcactccagcctgggtgacagagctagactctgtctcaaaaccaaaaaacaaaacaaaacaaaacaaacaaacaaaaaacataaaaaaggcaggggaggggaagatgtccagtatgaaactgggggggatgttaatgaattctgttagaatggggaatctggcataggtaaaaacttaaacctatgctgtctaatacaattgttgcttgccacatggagttaagtttaaattattcaaatgaaatgtaacttaaaaattcagttctgtcacatgagacacatttcaagtgctcaatagccacatgcagctagtggctattatattggaccacacaggtgtagaatattctcatcattgcagaaaatgctttcagacagggctgacatagaagatgcatcagagaagaggagggggatagacgggtgggtagatgagaggggcacataaggtaattgcaacagaatgaatgtttatgtctcccccaaattcatatgttaaaatcctaacccttaatgtgatggcattagcaggtggggccttggggaagtgattagattgtgagggtagaggcctcatgagtgagattagtgcccttataaaagggaccccagacagctcccttgtcccttttgctatgtgaagacatgataagaaaacggtcctctaagaacgaggaagtgggtgctcaccaggctctgattctgcctggtgccttgatctgggaattaccagcctacagatctgtgagaaataaatgatttttgtttaagctacccagactagctgcacacagagcgc

SEQ ID NO: 212 - DNA, 2522 bp, synthetic construct
  misc_feature 1..2522: note = Description of Artificial Sequence: Synthetic polynucleotide
  source 1..2522: mol_type = other DNA
acccggccttggacacgccattttcaactccgtggtgcgtttttttttttttttttttttttttgtaaaggagtttcgctcttgttgcccaggatggagtgcaagggatcttggctcaccacagcctccgcctcctgggttcaagtgattcttctgcctcagcctcccaagtagctgggattataagcacccaccaccacgcccagctaattttgtattttttagaagagatggagtttctccagttggccaggatggtctgtatatcctgacctcatgatctgcccgccgtggcctcccaaaatactgagattacaggcgtgagccaccacacctggccaagattgaaatcttaatgagagaaaagcagtttggaaacttacctgttttttattcaaagcccatcctctccttcctgttcatgaatggcaggcatcctgtggtgactaaagaaggtcctaccagctaagggatttcatcggcccaaggagcagcttccacaggagctccagcaggttccttggaaaaggtgacagtgctgggccatggtgccctgttcagaaatacaagactcagatttagtaaagccagtagtgtaatgtgaaatttgtttaaaaaatccttaaccaaaacatttcatttcataagaccgatgtattctatcaacagtcttttactgtatgttcatacttaacggcattaagaatcaccgtgatgggctggtgacatgcatctggttcatcaatgttagtggcaaagcttccagcatctacaactctagtcaccaaaatcaagaatgtctttctcttctctttttacctaattacaaaaaagggattgatttatgaaaagcaatatattaacaaatagcacaacttatgttcatatcattgccacttctagccacaaattaggagtcaggattaaggaaaacttacctaagttttcccaggctattttaaaattgctttttttctacaaaaataagtgttaaattcttcttttgaggtagtctcaattaagttgatgctaattggaaaagactattagatcttaagctgaactgacaattttataaaataaatagacttccttttctactattagaatgttctaataatgagttctattattatagtaatacttctgaattcccttttaaaatattgttactatcttggcatttttcagacttaacctgaaaatgttttaaatatcaaaatagacatatccgaagtttacaacaagggtgtacaatcatgatgggcacacttcctcaaacatgggggaccaacccaactcagacccatcacaccctcagcgtgtggaaatgttaaactatacaggaaccatggctggagacaaaaatctgtaggtgtccctgacataaaatgccatagtacttgcctgcagcctggacacaccctccaatatccttcaaattatctctagattactcacaatacctaatacaatggaaatgctacttaaatggttgttacactttattgcataaagaatgacaagaaaaaaagcttgtacatattcagtacagatgcaaccatccttttttttctggaatatttttgatctgaggttggtagaaagcaaggatgcaggacccacagataaagagggctgactgtatttaacacacacacacattttcttttgcctgagtaaaaaacaaaattgtacttgtaacacagctaaaggatgtcaacaaaactgttctttccaacctcaaattgatagagacgaccttcaaagtccacatagaacctcttattgccttttgtatttttagtagagacagggtttcaccatgttggccaggctggtctcaaactcctgaccttgtgatccgtctgcctcagcctcccaaagtgctgagattacaggcgtgagccaccgcacccggccatctctatttcttatacacaataatattataacaagaaagatataaatttgcttaatatgcagcttctgtttctgagttctgtagctgtcactcaataagataagaaagctactgatctcaccaaatcaaggacacaatactgttccctcaggtagcacaaattgcatgggctcaaaatatgggaaagacaatcaatattttatgaaatggtgtattttaaggctgacctacagataggaattttttttccaatccaagcaataaagctttgatgtggatgttcactccacatcctgtcctgatcctcagctgccagaggccagcctgcacttgccttcacactgcgtcttccttcatggcttcaggctaagattgccgggagcctcctataaatgtggtcatcttatggattaaacactttttttgttagttttgtttgtgttttagagacagggtctcactgtcgtccatcctggagtgcagtggcatgatcatagctttcggcaacctccaactcctaagctcaagtgatcctcccaactcagcctcctgtgtagctgggactacaggcacacggcacctgctgcacacagagcgc

SEQ ID NO: 213 - DNA, 2448 bp, synthetic construct
  misc_feature 1..2448: note = Description of Artificial Sequence: Synthetic polynucleotide
  source 1..2448: mol_type = other DNA
gttctttttaatggagtaacatctgcttgatccaatctccagtgtcagcctctgatagggaatatgccacatctacagcaatgaagttttgcggaaacattttattttgtgacatgatcacacacacacacatacacacacacacactcaaatgctgagggtcaagtagggtaaacagttgtagttttctcggttatcccaatgagaatgatttctcctgccacaggcaggggtggttgggcgagttggcagcagagggagagaaatgaagctgttgggaacggtgcacagacagtaaccacggaagcgacgcacgtttctgatcctgttgcccgtggacaaagtgccaatggtggtgtcagaatcactggccttgccctttgtgtccctgtgtggcttttcctgccttatcttctcagctgtctttttacaacctatacagtctagatgtgtttctccaactgtgagctcttagagctttctgggccttttttgggccccccaccccggtggaaaacattcttttgtaagcattcatttttctgaagtgagtttaatacgtgccaaggtcagcatgacgagaggtgcgggttataagaaagcacagcattgctttccgacatgggcattcccatgggggccacgtcagttgtgtagaggaaggagacagaacaagcagcaacttgttgaaggcagcagcacagactcagaagcagatacgatccagagtccttgctcaaactgggcctgattaggcaaaaaactgtccttcagatgagcaaagatgctggaagctagctgtgctcttgggaggaaggagagagtggcagtgaagaaagagggcaggcaagtgatcaaatggcatcaccacatcatactacgatgaatagtcattcattattaatgactgtctgcagcagaatcttgaaactgcttcctagaaacttagagatcattgcaaaattgaggatcaaattctgaacatctgatagtagacttcaaaacaggcattaggcaaatatggcactttagctattattgattctggatagctaaatcttttttggttacaaagttaagtctggacctgggattgagacttggaattgcacataaataaaaagctctagtgtctgtggcttcagagtaggcaaaatcttggaatagactcactagtaaaaagcaaatgctttggaaagagcagctagagggaggatggtcacaaaggcaggagtcctaccttccaaaatatggcgcttaggtagacttccacacacttagattcacatttgagccttaaaaggtagagtttcagatcctcctcacatctcaccttggctgccttagtccagaacttccaattaccttgtcaccttatctaagacctcccagggcttcaggtggtcaccctcaggtggcacacctcctggcaactgcttttagttctatttagaggttttccggtggtgtccttaggagttttctcattgaaaacgtgtggaccccatggctacacttggtgttgcaggagagttctgtctcctgctttcatgtctcaggcttctgccatttctgccaaaacacttaccttagttgaagcaatatcagcagttccccggaggcaccttcgcctctgtctctttggccagcacctgatttcctctagttgaagagcttcacacgcataaccaggtgactattctgatgtttcattcacagtttcttttatgtcttttagagaagttctggttaattccaacaacccatgaaacgtcaagcattaccacattacaaccatttactaagctgtgtacaaggcagacactgagggctggcaaccctgggtctcggcaccctctgctgtcacttggctgggtggagactgccagcctgcacccctgtgtctgccaccactccaaatgggttgcacctagagggagggatcactgataccctgggtaggccctggcatggcggggacaggtccagcctcctcttggcatctcccgggagtgaaggccctttggctggaggagatggcctgagagccagtgtggtccacagggagaagacagaagtcctgagcagtgatgacgatgccccagacagccctgtgatcctggagatcccctccttgccaccctccactccaccctccactcctacctacaagaagtccctccgcctctcctccgatcagatcgtaagtgtgggttgtctgtgtggaggttggggaggggctgagctaattctgtcttagagtccctcaggacctggctgagaaatggctccagggagccacatgttcaccaaaggccagaatctatccccttgggagcctccctgatggcctccacttgaatacctccaagggcagggcgctcacttctcatgacagcccatttgtctgtcagacaccgggaaagctgtcagctgcacacagagcgc

SEQ ID NO: 214 - DNA, 2343 bp, synthetic construct
  misc_feature 1..2343: note = Description of Artificial Sequence: Synthetic polynucleotide
  source 1..2343: mol_type = other DNA
gctgcacacagagcgcgcgctctgtgtgcagcacctgcttctccggaacgcagcgaagccagggcgctcggcctttgtgggcgtgctttgggctcccgagacccaagcccggaaggtctggcccctggtgggagatgtgtgcaaggagggccccaacccccctcagtcctcccagctcccctgcattcaaagatcctcctcccagtcagttcctttctgctgagatgctgaaatgcctttaagggtccttacagacgaggggctgccccatagagcatggagtgggtgggggatggggataacaccttcaatcttggaggcacaaaaggggaaataggggacgaaatggaaaaatacttttccttttatttttcccaggggtccgcatccttgatgaggaccagatggggaagatgttcaatagaatttggggtcaatatgtgactcagaatggcctgacagttgagaccccctctttattcataaaatatgaggcattgtcttctcaaggtggccatagcacttttttttctgatgatgtatacatttaaggagttgatataaagggtaccattaatttatcagggattgttgacaggaattgaaaccccagcgctagaataggtagtgaaaggagaggccgttcctttgttcatgttgtaatctggggtaagaaaattactaattttaaattcacaacagcttaccctaccaagtgtggggctgttttttatttttatttttaattatttaatccatctatgtttgcttccctaatgtggtgaatcatagtctcaattttccttctttctaaatgctagagtatctagcatatgatcaaataaagtacaatattatggtagtaactcaaatcatcccaagctgttgcctgtctctttccaccattcaactacaccatatctatcaaacctaaaaactcaactctaagcctcagctggaggtgagaccttgcttcctgtcacaaagaaaagggaagcatcacttattagaaaggtgcagaaggtgaaaagttttgatgcacataagacttttatagaagtgtaattttgcaattttttagcagttttaagtacaaaaaagttcttaactttgtatttttcaaataactattcataatttccatgcacagggttgagaaaactggctttccctcttagaaactgatagaaaacctccaaagtttatggtaaaagaactatcatttgttacagcagatgaagactatgtttttatactgcaatgtccatgtggcattgaaaagtatactgaatattgaataaagagccatgaaagtaataatattacttgaaacatttgcaaagagaattcaaattaggaagaagggaattaaaatgatagggaagtgaagttaaatgaatttgtaactcttgaatatttcagttataaacattcttacacaatgtatgaatccaacacctaaaggctcacattaaagaaaataaaaattgttttaggtctttaattccaaatctttctctaaacaaggaaaaaaatcctttgactcagcatttcttttggcttccaatttgggtactgcaggtgatttaagcattcatcatgttagcatttcaataatacatcttgtcattcctgattgagtatatatgttggaaatgccattttgaacagtaaaatcaaatatgttttcagtcatttctacactaaaaaggttctctaaccacatttatctgctagtaaatgaggactttttaaaatgcatctgttctgctgatgaatgggcttgcggagtgtttcaaacgagcaccagcattaagttgaagaaggcaaaccctgtatatcatgctttcatggctctcacattatactatttaatatgccgatagtactgttaaatatttagcaaagttcccttataaccctaccatctattcaaatgggattttaagacatttttgcagcacataagtaaaaatgatgctggagaactggaggcagttgtagcatggcttatttgcatccatctcactctggcacaactatacccatactgttagactgacattttataacttatttatttgtgctttaatttcggtatttacccagaagtcattcaggagcaggttgctcagtttccatgtagttgtgtggttttgggtgagtttcttaatcttgagttctaatttgattgtgctatggtctgagagactgttatgatttcagttcttatgcatttgctgaggagtgttttacttccaattatgtcatggatttgagagtaagtgccatgtggcactgagaagaatgtatattctgttgttttgggtggagagttctgta

SEQ ID NO: 215 - DNA, 2197 bp, synthetic construct
  misc_feature 1..2197: note = Description of Artificial Sequence: Synthetic polynucleotide
  source 1..2197: mol_type = other DNA
aattagttgggtgtggtggcgcatgcctgtaatcccagctactcaggaggctgaggcaggagaatcgcttgaacctgggtggcggcggcgataacgcaattgcagtccagcctgggcaacaaaagtgaaactcaaaaaaaaaaaaaatcaccaggtctcagactcctgggagacagaccccagctccgacgttccagtgggatctcattaacccctgatactgaccttccaatttgatataccttccttttaaaatatatttattgaaatacaaagagtcaatataaagaaaaatagaggtcaccatacttggccacagttagaccgctcataggcccatggctgctgcaaccatgggcaggacacagagggagtccagcctctactgataaatctgggcaggttcaccttcgcaggccaagccaggggccatccctggtatgcgaaacctggaggttttccaggaagccggctgctccagagctagctgtcaagtctttagccccacaggctggtgcccagagccacttccacaggagcagcctcgggcttcacccacacccaaggagcttccgaggcaggaggcaagcaaggtgaagggagggttcagggtcccacaacagcagtgagcagggtccagccatcaggcctcagagcctctgtcatgccacctgcgagacgggctcctcctgtccccactgtgtccccgcttcctcctcttacagcagggggagttggagtcggagtcatggtggtggtgcctgggcctggggagaccaatggcagtcagtcactcggaaggagtcaaccaggcccccacccccaagaggcagatatggaccagggcatacctctcaggagatgtgggagaggaggtggcctcagctggccgcctgtgctctttgtctttcttcttcttctctttcttgtgtttcctctttttctttttcttcttctccttcttgcttttcctgtggctctcacaactacaaggaggatacaaggtgtgcctcagaccctagtcttgcaagccaagagagtgaacacaagcaggccccatccagatgaagccaccacccacaagtgcgtctttaaatcagttaaatcaaactacaaattccactcctcagttacgtagtcacgtggccagtggctaccacatcacgcagtgctggtgcaggacactgccaccatcgcacgcagttctcttgcacagctcaggtctacacactccgcctccatctcaccccctgccttgtttcccacctccctcccctccacaccgcccggtgctccagccacgtggacctggctgtccctcaacatgccgaacacacatctgctttaggcactctgcccggatgcccttccatacagcatggcctgctgccttcctttcttgagtcattgctcaaaggtcactttaccctgtcatggaagccttccttatctataccacataaccaagcaacccctttcccagagcatttgctatccccctgctattttattttctccatagcacttagcatcacacacacacatattgtttactcttttacctgattagaatttaagcttcgtgagcctagagacttattttccccccttaattatatcccaatttctaaaacagttcttggcaagtagagtgatctcaataaatattaatcaaataaataaatgaatacaggaatccttgaatctgtctgggggacactattctcaacaagacactgcaaattgaccaaggggttgacaaaataaataaaaatacacaaaggtttgagatggtcctgaacaattatcatctcttgattccaagataaaagtattttcaagagtttgagaactcatttaaatctaatttgaaaattgcattgattttacacccttccggaagggcatgtttcctgcagagaaagcaagtaggtgccatctagtggcaacaaaggagatccacatttgtgttaactggaatgtatcgattagcagtgattgaaaatgtagttcctgatccagaagcttatgaactctatgacagaacagttgtgatagccataagtcttgaagggtgcattttccatggaatatatggcattgaaaaaaacacagttccatttcttctaaattatttctaatttttccttttaatttttgcttgttttctgggatttgacggctgcacacagagcgc

SEQ ID NO: 216 - DNA, 2190 bp, synthetic construct
  misc_feature 1..2190: note = Description of Artificial Sequence: Synthetic polynucleotide
  source 1..2190: mol_type = other DNA
tcactgtagacaaagtgagagacaaatgaaagattgtcttagttttaccttaaaagtttcacccctccctgttgagattgatggctgcatcctgttgccactggctctgcctgcggccagctgcccatgggcttcccagtgctctcccaggactgcccacctgcaggcccatggctcagtttcctctgtgcatgggcatcagttcagccagtgctgtccagagcaagctctggttacagctcctgcctccctatcactaaggaaaatcgcaggccccaaattgggtttgcccctaagcagctggcctgctcctgcagcccacatcaggcccctgtctgccgccagtgctccacgcaggcacccgccagtgctccacacaggcacccgccagtgctccacgcaggcacccgccagtgctccacgcaggcacccacaagagccacaggtttcacagggtggctttcattcttcaaccaagggggacaaaacacgctctggaggcctcctgtgattctgacagttcagagatgagagagacagagacatagacacagagagggagagacagagaggtagaggatgtcacagatacagagagacaaaaaggggagaagagggtattcgtgagcacaaacacagagagaaaaagcaaacaccttttggaggtgtagggagagaccagtctaactgtagttagggagttacagaaggagaatcaaagcaaacaagttagaaatgaaggttgtagtcagagtattgaaggctttggatgtcagtctgttgactagactttattctgaagcatttcaaaaactgcttccttgaactgccttttcagccacttatatgattctctttcttccaggagatgttgccaaatttgtgttttgcccttcacagttggggagaaaagaaggaagccaggacatttaatgtctattcctgtatataaatatataagctgtcctgaggaaaggtcttcccttagaacatttcatttgaaaatagcttatattaataactaacacattgtcaaatacagctaattggaggacacttaattttttctgcagaaataccaagtctcttaaaactctaatatttgaaaggcttaatgagatgcaagtgaaatagcatatggtcttttgctaacagtaaaggaaaaacaattactcaagcagacatgtagctcttagttaatgggaacaaagcaaggcaaaaatgtgtaaagctgttaaaaaatacaccaaatactgggcacatcaccggacagaggaatgcacccttctctcatggatactctgcatctcaacatccggttgatctcctggaagatacaggcttatggtaaaaaggacactttataacaccatgcactaaacatagctaaaagagtttatgttttctaaagtttttttttttttgagatagagtctcgctctgtcacccaggctggagtgcagtggcgtgatctcggctccctgcaacctccacctcataggttcaagcgattctcctgcctcagcctcccaagtagctgggattacaggtgcatgccaccacacccggctgatttttgtgtttgtagtagaagacagagttttgccatgttcgccaggctggtttcgaactcctgacctcaggtgatccacctgcctcggccccccacagtgctgggattacaggcatgagccaccgcacccagcataaagttttgtaatagtgagataatctctgccaggttcttggaggagaaaaattttattatttcattaatacttgtcaaaaatctagtgagcaagcaagggaataaatgacttccttgttgtcttgggagttttgccctctgcctctttctccaagtctcacagttgcagaagaggaccaactacctgaccattggtttggctctaggcatgtacaccataagtcaaataagtctgggaaatactgcatgaaataacacacctcacttcaactcagatttcctgtgcacattggcatattggaggttgagaagtcctgtagtaagctttattattattacattattatttccagttattttctcagactttccaaagcttgttggcctattgagcccattttatcagaataactcttaatatccaaaacccttatttttgtgagtcatagtttgagaattgcccatagctgcacacagagcgc

SEQ ID NO: 217 - DNA, 2172 bp, synthetic construct
  misc_feature 1..2172: note = Description of Artificial Sequence: Synthetic polynucleotide
  source 1..2172: mol_type = other DNA
gctgcacacagagcgccagcaagcaagacatttcctctgttcctttttggggcctcaagaggattgggcctgggacacagacacacagattcactggcaggaacacagaaaggaacccacaaggatggcattgtggcccctgtccatactactaatccagacttagatttgtccacatctatatggacctctgcattccgtctactcacctgcaccttctctcatgagcagacacgcaccaagaaacacatatagaaatgtgaggttatcaaaataaaacaatgctactctaacctatattttctcatacaaaatttgcaatgcaacatgattttgtccatattaaatctactttaggaaggtttcttttaatacacaaaaacctcaccaaattacaaggctgtcttttaagttctaactggaaggccaaaatagcaaagatacattcttccagggttgccatattacgtaaataaaaattcttcatttttgatctgaaattcaaatataactgggcatcctatattttatctgacaaccctacactcttcaaactaaagtgagctcccacctctaccaaggtattacagcaccagctcccacttctaaagacaggctgtggcttctatcacagcaggattttaactaatgaagtcttaggagttaggatgaaagtgtccttttccaggtttttggaagttcatacccttaccagtaaaatcttgtacaaatcgaatttttaaattcctcatggtgcctcctccctcacttctccatctgtcatgatggggaaaagtacaaatccttccttctttgatctggaaaatttaatctatttcattctcctctgaaacttaattatgtgcttgtcttccttctcctatttgactggaaggcaagagtatatgtcttatccatctgtttacttcctctccagcacagcattttgcacagaggagatgctctgtgaatacttatggaatgaatgaatattgcattcgtgatgtatttaaaactagcagctattagccaacacagataactactcacgacatgttcaagtagttcttaagaataaagaaaaatttatttgaataattattattgtgaattttgtaaacattctaaatctcatcaatatgatctaaccttatttggaaataaaaattaggaaataaaaacttgggttttatttttatatatagatctaaaatttgaatatttttctgtgctgattaagtagaatttatcctggtcatttagattctgaacttttattttaatcaaaaatatttgcttgcctggattattgagataactgccataatcctccatttcttgtggtttatttcaattactgatcttactcagttttctgattgtatttgtcagacaacaaatcccctcacccaaaagactcattttagtgacagtaatcttattagtgaggaggggaactgcacgttactcgccggacagaatgctctcatgttagcctaagagcaaatccttgtacatgcgaaggtcaaaagactttccggtctgatttttctgaaaagcatgaagcaggatgttaaggcatcacacctaggactatgaaaccagaatgtgtctttagcaggtcaaatttgctcagtgtcactgaagtgacacaaattcgtggtttgggaaatattttgaagaagagacatatttattttgatttgtatcctttaggatactctttcttttctttttcaccagcaaaataaataaataaatacaaactcctcactctagagaaagaaaaggtattcaagcagagagaactctgcagatagatcatggctgtagaacaggatataatctttaattaaaaactgaaaacaatgaaaaaaatgtagagagtccttcaagagaagagagctatgatgatagtgaaagacaaactaaagggcatcacttacagtctaatagctaagctcttttcttttctttttttctttttctttcttttttttttctttttttttgagacaaagtcttgttgtcacccaggctggagtgtaatggcacaatctcagctcactgtcacctctgccttctgggttcaagcaactctcatgcctcagcctcccaagtagctgggattacaggcatgccccaccatttccagttatttttacatttttt

SEQ ID NO: 218 - DNA, 2146 bp, synthetic construct
  misc_feature 1..2146: note = Description of Artificial Sequence: Synthetic polynucleotide
  source 1..2146: mol_type = other DNA
agcctctccaaaggagacaatcagatatacattgatctcagtgagcagaggggtgacttcgaatagaagggcaggcaggttggtcctaagcagttcccagcttgacttttcccttttagtcatttggggacatgaagactcattttcctttcagaatacaacaattccttatccatagttccccaaagtcttacctcttccttgcgttaactcaaaagaccaaagttcaaagtctcatctgagactcaagacaagttcctaccacctatgaacctgcatttttttttagttatttacttaagatacaatggtggtacagatattggataaacattcccatttcaaaagggagaaatcagcatataaaaagggagaataggccccacataagtccaaaacactgcatgacagacattaaaccttcaagctccaaaataatccttgactccatgtccaacatccagggcacattggtgcaaggggtgggctcccaaggccttgtgcacctctgtccctgtggctttgcagggtggctttgcagggtgcacctccgtccctgtggctgctctcacaggttagagttgagtggctgtggcttttctaggttcaaggtgcaaccagctggtggctctaccattcttaggtctggaggagggtggcagcatgattcccacaactccactagtcaatgccctggtggaaactctgtgtgggggctccgatcccctctttatcattggcactgccctcttagcgtctctttgtaggggctctgcacctgtggcaggcttttgcctgggcacttagactttcccgtacatctgaaatcaaggagtaggctgctaagcctccatcactcttgcattctgggaatatgcagacttgacaacatgtggaagcctccaaggtttatttataacttgtgccctctggagcaacctctctgtcctgcttattggcctcttctgctcttactctccctccactttctctgatccagtcacattggcttcctggatgttccttaaatacactggcaagcatctaccacaaggcctttgcacttacctagaacaattcttgtccacatgtccaattgtctctgcacaaaagtcacagatacctagtgaggccttccctaaccacccctgtttaaaacaacaactccacagttcactcccatcccctcattttctcaccctttctcatctttatttgtttccatagcacttttcaccacatgacctacttcatgcagtatttttcttttcttttctttttcgtttgtctgtttttgggacagggtctcactctgttgcccaggctggagtgcagtagtatgatcttggctcactgcaacctcgtctatcccgggctcaagtgatcctcccgccccagccctccaagtggctgggagtacaggcacaggccaccacacccggctaatttttgtattttttgtagagacagggtttcacaaggttgcccaggctggtctcaaactcctgagctcaagtgatctatccacctccacctcccaaagtgctgggattacaggtgtgagccactgtgccccgcctttatacagtatttttctaatttttaagtctattatctctctttctcactagctggtaaactccatgggagcaaggatatttgtttgttttgttccttgctatatatcagtgctataaagaaattacaaattcatgatgatcaatggccattaaaattatttagtgaatgggatattagtataataccaaagtagtattacatagatgactttctggttgcaaagggagaaacactactattaaatagaggaatctagtggttaatttagtatcattaatggcaggtcaaccaggtaatatgtcttttcttaagtgatgcaacatgaagttgacaatatcacatgaaatattatcttgccaaatatgcttaacttgaatccatagagcctttagatataactctcagtttacaaagtaaagaataagttaaaattcaccacaaggaagccaccagacaaaatcagaaggtggcacatcttgtaaaattgttcaaagtcatgataaatggtctgttctagatgagaagagacataagggataagggagctgggctgcacacagagcgc

SEQ ID NO: 219 - DNA, 2085 bp, synthetic construct
  misc_feature 1..2085: note = Description of Artificial Sequence: Synthetic polynucleotide
  source 1..2085: mol_type = other DNA
gctgcacacagagcgccccctaattggcccagctccctattgtcgtctggggtgttgtgtttgagccggtgaaaaagttgaaccagaaacacattcctggtgaaaaagactggctcattgcagctgtggaccaccatctggggtggatctaacatcaaccaggggctctgagggggaaaagagccaagcaccaggtctctctaggattgttggatgtcaccacttttctgagagagtaggactcatttatcactaagatgtttcaaacacaagctgttctttcatagcgtatactggtaactggtcacctcattcttcagataaacagtgcatactacccttagtatcagaaacatgcttcccagttttaaaacttggattcctttctatttcttttggccccttcttaaaagtgaaaagaacaatgatgggagatctttttagcgtggggcccaacaagagatagatatgcatgtttgctgcatgccagatatcttttatttaattctacagctttttccagaatggctgccaggtagagcacctgcatcattttggcaaagtcctctttggagtggggtcttcaagcctgatcttggaattgcgttttattattgtctgcctaggactcaggtctgcactgtgggacacaatgctaagtggaaggccccttatccatggcaccatggaagcaggcgcaggatgcatgggaaactgcaatggcattaaaggaggaagctccaagtggatttggagccattctataactccttgaaaacaagactacctcggggatatttaggatgactcgtgtgtcaccaagtgagaaatacctagtgttggaacatttccagtccttctcttgatggttctactttctgcaggttgttttgagcctaccaatcactactgcatgaggactttgaaactcgagagggaattttttttttatcgataagaggtgcttatctataaagagccctcttgtgttttgattgacttatttatttatttatttatttatttatttatagattaaatatctgccgtgcttcttacatcaagagcactcacacaggagcttactgaacttttcctagttttgagtaattgtctgagatttatttaaaaacctatctaaattcaatatcagcttcagaaccataccacactgagaatcacattacgaattagagagagagatctgtgttcactcactaccttctacaatttttaagtagttacgtggcctttggtagtgtagttaatggatctgagaccagttttcctgaactctaaaatgaatacaatttcagtcatttgtgttgaactgaagttaaaattaaaataaataagtaatgaatgtcagttgttgacctctctgtgtgactatgcttttcttttagctgggcagatttacttataacacagagctatttagagattttatgtattttccattggttattaaattattatctcttttccgatttctaaggatcaacttaaattttaaataatcatcataatacaaatatttcttgtttgcttattgagatttacttagaagaatgtagagagtaaataatgtaactaaaataattgcataaaagagattgttaaaaatttagattagtagaaagtaaaggtcaatgttaaattatatgatttggctagaaaaataaatcacttcaacttgttccattcatttttttttttaaatactgcctttagaagtattatctttccattgagatttggcctgaagttcctagatatgtaaatggttccccaagtttacttagatgatgcatttaaagttgtttttactaaaatatatcttggaagtagactgtaggcttttttgatcaggtgacagtggtattattttattttgaaataaccatctggatttaagattattgtgggcctactaatgcagatatcatgttaaaaatttataactttataatagttaaaatttcctgaaatctgatggagaaagacaattatataagagaaagctactggcatatttccattgctaggggctaaaggcacagaacattgcgctctgtgtgcagc

SEQ ID NO: 220 - DNA, 2082 bp, synthetic construct
  misc_feature 1..2082: note = Description of Artificial Sequence: Synthetic polynucleotide
  source 1..2082: mol_type = other DNA
gctgcacacagagcgcccattgctcttaggataagcagtaaaatacaaaacttggcctcttagtatttgtatggccagacccctgcctagctcaccatcttcaactcataccagtctatcagttgcccttgccctctgctttccacataatatatttggtcctcatagtaaccctatatgaaatgggcaatactggcatttaaccataaattaacaccgtacacagtgtcatactgagtgtggaatattgtactatgatggatttttgcatgtttctttggcatctcataatatctctaaattatcctattgtttgcagattaggcccggatataaaggactacttctaagtggctccaaattagttttcagtctcaacctagaaaaccagtcatttctgatccctagctttctgcatttcagttctcaggtcttttgcccacctccccacactttcttcgatacttgaagattgttcacacatctgcatttcctcttactgttcttccgacctgtactttctctaccactttctctgtccagaatacaaactaacatgtcaaggttcaatgcaagccccatttcctttgaaaggcttcccttgccttttctccaattcagacaaacttcactacttctcactttgagctccactctgttataggtcaatttcacctttctcacttcacttgatgttttgggacagtgcagtaggtggtaggactcttcactctgtctggatttgaaaacagactctcccacatacggtgtgtgattttaggcaggctagttcattcttctgtgcctcaatctgcttatctgaaagtgaagatcatgatactctcagagggttattgtgaggatcaatggagctaatttacataaagagtttggaacaatgcctgccacataatactttgtaggcgttagcactttcctttattttccttttcttatttttaattttattaaaggtttcccctgtctgttctgttgagacaggaagtagctgtttcttatctaccatttaatctttaggacctagtgtagtacttgatgggtataaattaggtgttctccggttgcttggaggatgaataaatgaagggtcaattaggaggctccagcccagctgcctttccttttgcaataatggagcaaacttatttgaaatgctagctgtgattacacattaaataatgtaggatcaaaaagccccattcatgactaccttttatcataaatgtttatcttttcattggtagagttatatattataagggcatttaaaaattgaaccaacccaaacctctatcagtgaactaatagtacatcaaaattaaaatcaatgatgaatgtagatctaaatttttcaacatgaaaatacatctctaatatattatagagtaaaaatatcaagctgcaaaactataaatgtgtagaatgatcacatttttgtaaaaaaaaggctgtgaatgtacaagtaatgcaaaataggatagtagacatttgtattcgtcttttttcacactgctataaagacatgtctgagactgggtaatttataaagaaaagaggtttaattggctcacagttctgtatgccatacaggaagcatagcagcttcggcttctagggaggtctcagcaagcttccagtcatggcaaagggaaagggggagtgaggtatctcatgtggtgggagcaggagaagaaaggcaaggtgggaggtgccgcacacttttaaacagccagatctcatggtaacttactatcatgagaacagcaccaaggggatgattctaaaccattattaagaaagtgcccctgtgatcccatcacctaccaccagacctcgcctcagacattgaggattacaacttgacaagacatttgagaaagtacacagatacaaacatatcattctgcccctggcccctcccaaatcgtatgtccttctcacattgcaaaatacaatcatgccttcctaacagtcacccaaagtcttaactcattccagcattaactcaaaagtctaaagtcttatttgagacgaggctagctccttccatctatgatccta

SEQ ID NO: 221 - DNA, 1986 bp, synthetic construct
  misc_feature 1..1986: note = Description of Artificial Sequence: Synthetic polynucleotide
  source 1..1986: mol_type = other DNA
gctgcacacagagcgcccaggacatagggcatttggggatttgcaggtggaatcagagtccctgattatgtatccaatgaatcatttgaggagctttcattacctgtcagtaatgtaaacgcagctgtcatttgtgacaggttaccacatgccaggcagtctgctaagagctttgcatgcatggtctcatttaattatcaggagaatcctgtgtgatgggtattattatctcagtttacagacgtgaacagagagtttagctagatttgccaagagtacacccttagaaagtggcaaagccaggatttgaacccaagtcctactgactccgaagcccagcttctagccatctgtggaaatccagggtctgtgctgtcagtcttggctgagcatggagttaccctgccccgcaggagccactgtccagtgcagtgcacagtagaggaaccagggctctgacctggacatggcccagggacctttgtccaggctgttctgtgagctctaggccccagatggcaggcaggaagcctctgtgttccccagagcacactcctgctggccacagtggcctccaggtcactccagaagggaaagctgctgactaagaccctgtgctttctaaggaaagccacttttatttgagatgtcttgctgatcctcccagggcacccaggaagacaactgagatttttatctcatcttacagctgaaggaaaaagggtcactggcaggtggcttgcacaaagtcacagagctggggaggaacccaggcagggttcagaactaagagtctgaggctcctatccttttgctcgttacaactgggaagctgcaacccatatcattttattctcttctgttttattctgtgctctgtaaattggcagtgaggcttaaagtactgcaggaaggagaaatagaaatggaagagatttcaatcatactcatctttaaaatatacattttcaagatgttacaattacccattgtcaatgtatgaaaatggtatccagtgagcttcagattagggctacaaatattgattgatgggtgccacaatcagcctgacctggaaattctgacctggaaacaaagtaattgaactgaggagcccttctggtcaaacataaaatgtatcgaaactagacttattcttctttcatgttctcttacaaagattttttaagctaggctcaactgaaaattaaaaataataagtttatttatggaaaacttcttgcatccctaaaacttttaatggatgccaccatcaaaggtttcttgcctggaaatttcttaattcctcttattcaattgaaaggggctttgccagtagaatttgtaattctattgaattacataaaggagtacatgaagaagtttcttgacaggcttctaaacaaaatagcaatgtggctgtggacaattcttgcatgtgtatctcattttttgctggcgagcataattcttttacctggcttcacttggcggttgaaagaatacaatgaggtagaagataaaaaaatgttttccaaaatctaattttaagtcttatgcatagctgtagttcatctggggtcttcacttcttatttccctctccccaaaatcactattctccttttgccctgtgaatgatatctgaaataggattgtcaaaatgtgatctcagctaccatatttgaatgtgaaaccttatatttttaatagcaaaccttagcagaaaacatttattcaaaaaaaaatacataaataggcctggtgaagtggctcatgcctgtaatcttagtactttgggaggtcaaagcaggaagatagcttgagcccaggagttcaagatcagcctgggcaacctagggagaccccatctctaaaaaaatttttaaaataaataaataaataaataaaaacagccaggtgtggtggtgcatgcctgtagtcccagccactctggagtctgagataggaggattgcttgagctct

SEQ ID NO: 222 - DNA, 1886 bp, synthetic construct
  misc_feature 1..1886: note = Description of Artificial Sequence: Synthetic polynucleotide
  source 1..1886: mol_type = other DNA
tttgcatgccagactagaaacagaaagtctgatttttagtttaatgtaaaactagagcatatttacaactcagattataattttgtagaaagaagtgccgaaaagaataaactagaaaattccatattaaataaaaaacaaattactgtttctaaaaatactgaaatacgggagcttctgtaaccatctaaatagcttacttccagcattatggattgagcactggcagagcatgagtaagaatatacaccatccagctgtaactcttcatggagtttttctctctcaccttttagagatttgaaaactaaaccctgactcactgggatgaagggcagaagggaaagggcagtgtgaagttactggtatagggactgctagtgatcacaactgtgcttgaagtagatccatttctacaatagtattagtgaatacacagaggctaaacagagaagagggaagattcacgtgtgttctgctttcccttactgtgttctataccttgtctacaatatcctataacctagagtgaaagcaaaggccaagaaaaattgtatggcactcctctaagagagcatgatcaaagatatactccttgaaaactataacatatttgaataatttttgaacatccttaaacaatactatgttttaaatatttaagctatttatttaacatgttactaaatgtcatctaatttaggaatgccagcccccagggaagagtcctctaagtgaggagagttgtgcagaaaagaaaggccattgttacaacagttttcttcccgcctcagataccgattctcagatgacagcatcggcaattagagacggacagattcctgccacctacctgatattggtcccttgttggccggctgtgtgtaggccacctccctagttcaggccctttttaaagtgtcacctggcttcttgcatcacctttgtagctggtccacttgccttagcatttcttcatgctgacatggccagctaatgtagaggagagcttcaactagtccacgcctgacatacaggcttcccacaaagcccagctgccaaaacctttcctggtactcaacttccagttgccccttctggagtcatggctacatctccttcgaggtacagatttttgagctaaattaccaaaaagagtcagtcagtgatgacctgagcaagtgtgttccaggcagtgcagaaggcccgtgcaaagaccctgagcccaaagaagttctgtcaagatcagacaacttgcagaggccagcgctgctgcagggtcataaagaaaggatcatagcggcttaatatgggccaggaatgagagtcaggaccagcccatgctgccaaaagaagagtgtggctctctagtcatggagggtgtcatgcctgaccatggcctagtttctgttggaagaccccattgagaccccaggagaatgaatgggggtgaggaggacaagagggaaagtgacagctcatctaacagtccaggggtgaaatgatggaggcttgcagaggaccagtgaccatgaaaccaaagagaaataaacagactcaagatatacaacagactgggtgcagtggctcatgcctataatcccagcactttgggaggctgaggtgggcagatcacctgaggtcaggagtttgagacgtgcctggccaacatagtgaaaccccatctctagtaaaaatacaaaaattagctgggcgtgtggcaggcgcctataatcctagctactcgggaggctgaggcagaagaatcgcttgaaccaaggaggcagaggtgcagtgagccaagatcatgtcattgcactccagcaggggcgacaagagcaagactccatttcaaaaaaaaaaaaagatagctgcacacagagcgc

SEQ ID NO: 223 - DNA, 1800 bp, synthetic construct
  misc_feature 1..1800: note = Description of Artificial Sequence: Synthetic polynucleotide
  source 1..1800: mol_type = other DNA
gctgcacacagagcgcccgagcctcacaggaggctaaatcttatgacatagtgaggaactggtgacaagtggacagcctgtattcaaaaggctgggctgggccgggcacggtggctcacgcctgtaatcccagcgctttgggaggccgaggcaggcggatcacaaggtcaggagattgagaccatcctggctaacacgatgaaaccccgtctctactaaaaatacaaaaatttagccgggcgtggtggcggacgcctgtagtcccagttattcaggaggctgaggcaggcgaatggcgtgaacccgggaggcggagcttgcagtgagccgagattgcgccactgcactccagccactccagcttgggtgacggagtgagactccatctcaaaaaaaaaagaagaaaaagaaaaagaaataatgttaaagattttatttattttgacctcgaaacactgcttactattgagccaagtagtatactacttttcattcttatgtaagtattattacttgttctctttcccctggtccttttagcctcatttctttgttcatactgtttttgtttgaacaattgaaccattgtttcactttgccttttgtaacacaacagcagcatacattgaaaaatgcttactgtgcacaggaaatgtgctaggccctgaacgtataaggatgataaagacagagttcctgattttaaagagccattgaccttataggagaaaaacactggaaaaaatcatctccaccatagtatagtttagtctgtgcagaggagtcaaaagggagagacagtgactgaagtcagtctgagaatgctgtttcaaggcagactttccagtgaggtgcacctgatgagtaaggacaaatatgaacttaacaggtgaatggggagtggagatccaggtgaggcgacttctcgcatgagttaatgccaggatgtgtgaaactttactgtgtgttaagggaggcttgctggctcagcagcactggtgcttaaagtaaaaggggagggatgatgctggagtggggagcaggctcagatcccaaagggctccttatgaaatgttaaggaatcagcaaggagggttggggagccggggaaaatttttatctgaaataatattatagaccagcactggacctatgattctacagtaagagaaatgtcatttatctgccctgtccaatacattagccactagtcatatgtggctattagacactaaacatggctaccatggctgaggcactgaatttttattatttaaatgtcagtgttaataaccatatgtgggtagtagtgaccatattggacagtgaagctattgatggatcattccgatggctgtgtgaggatggtttatttagtaagatttattccataacatttttaaccctctgctatgcacttggcactagaatgtaggcacaaggcactaggaatatagctatgcctcagttggtcccagatcctgcctgcatggatctcttgcaatgcttgttaaaaattaaaatgcctggcccttctcagaatctggaggtgcaagctggaattctgtacttttaagtaaacccagatgattcttgtcatcactgcagtgtgagaaccactattctatgtttggccagttggagactggaggcaggatggccagttaggagactctgtgttgtggccagactgttcctaaactgtctaggagaaggagaaccataaagatccctagtgatcatgaatagctgttaggatctgaggccaccctcacagcaatggaagggatttagaaaatc

SEQ ID NO: 224 - DNA, 1793 bp, synthetic construct
  misc_feature 1..1793: note = Description of Artificial Sequence: Synthetic polynucleotide
  source 1..1793: mol_type = other DNA
gctgcacacagagcgctataaagatttttaaatggtaggccggtatagggcatttaccatgaatgaagcttgcaggactggaagttgctctgggtgagtcagtgagtaagtggtgagtgaatgtgaaggccattatcatacactactgtagaagttataaacactgtacactaaacttatagaaaggattttctttcttcaataataaattaacctcaacttactggagaaactttgtcatatatggggtttgtttttgaccaagacctcattatgcagcgcatgaccgtaatgacttcagcattcattcagctttgactgttttcctccttaacttcattgctacctgttgcttcaattgtcttgacttttgctgcctcatgtatcaaatgatggccagaaaacgacgtctctaagctccctcaagaatctgtgcgtagctatgggaagaacccagagggctgtggccactgcttgtcttcggttgtcctgaggatctgcagaacctgagcaacatctgcaaagcagcaagatgacagcaaaggcatttggtttagggtcaaagatggggtggagggagcagagagggatttcttccttctgcttctggagaagggaaaatcaggcaccaaagtctcaatacttcacattctaaaaactgggctcatttaacagggccagatcaattcattttggaaacattccagaagacggggtttgcctggtaaatttataatgtaaagaagagggcaatgcaaacaactgctaagagtgcaggcagccattaattcattaataatgttgaacatctactcgtatatattgaacatatagaagatatcaaaaacacagataattgacctaaaagacttattacacccccaaattggagaatttatattcctttcaataatgtaagaataactttaaaaaatgacaatgtgccagaccactaaattgattcctggccaggcatggtggctcatgtctgtaatcttagcactttgggaggccaaggcaggaggatcctgtgaagccagaagtactcaaggggctaagataggaggatcacttgagcccaggggttcaactctgcagtgagctatagtcatgccacagcaccacttcaggatagatgacagagtgagactctttatctaaaataaaatttaaaaacaagaaagaaattctcaatacatttttaaaggattgttaccacttagagtacatgttctaattacaataaaatgagtttagatgtcaatgacagaaagataaccaaaaacttcatgtatttgtaaaacataaacatatctttaaaaatgggagtaaaagaagaactcatataggatatcagaaaatattagtgcacagaaagcataatagagaggaaatttttatctttaaatattatattaggaaaaagcctgaaaaataagtgagctaagaattgagcacaaaaaaagacactgaagaggggaataacatttccagtgacagccagatagctcatggatgaactacactgaggttaacttaaaaagatgaaaacatgcatttgcaatcatcattaagataatcaaacctttacctagctgtccaaagaagcaaaagcaatcctctctagatgatggtagtaatctctagagctttgaattgtctctagaatattcaaagacaaatattaagtctaaaatgctgatgcttacaaacagacaagagcagataaaaaagaaaataaattagaaaatagaaagccagaggagatggaaatttcatggttattatataca

SEQ ID NO: 225 - DNA, 1790 bp, synthetic construct
  misc_feature 1..1790: note = Description of Artificial Sequence: Synthetic polynucleotide
  source 1..1790: mol_type = other DNA
gctgcacacagagcgctaagaattttctagtgctatataaagaaatgatgatggagacaaaagccttgctttcctctttttagaatttattttcgatttttagcatactgtggggcttttagagctaatatgatctaaattcagaaaatttaattttcatagtaggccaggtgtgaattacttatgtttgctatagaatgcttatttagactaacaataaatttactttgctttctaaggccagtcagcgaatgtggggatgaggcaggatgttttaaatgagccagagatgatccacaaagtgaacagtcgacacagaggtctttgagttggatggttgcaaatatattgacattagagtgaaaactccttcctttgggtaaactaaagaaagataaagtatactaaaaaattttaagatggtgttatacaaaaaaaagtttgggtctaacgtgtccacaaagactgtcaagtgaagaatggtggagattcttggtgtttgagcagccaacctggatgagtgacttcagggacagagcagaggaaagcaaaatgaatttcctttatttacccaaaacttgttgactgaatttttgtataggtccgggaaaataagcctaaacaaatagttgtagccttagaaaaactgttttcccatttctttctgagttagaatcagcatagcctccctgtcgccttaaatgtaaaaatcctattttgattaataccccagcctaagagttatagcaatacgagagactgaatctatttttgtttcgggtctttacctcatagtatgaaattagtaagacactgcatagattttgccctgaatactggtgtgcccaggtatgccgtgctctctctctgtttccagtggtggtaattttaaggcctaaagaaagctggggttaatcctgaagctaaaagtaaatgtttcttgaattgattttgttctgtggtacaaataagcaaacatgtattcaatgctttgaagtttaagaagcatgatacaaatataaactatcatttttctgtccaatgtggtggtggacacctgtaatcccagctactcagaggctgagggagaaggatcccctgaggtcaggggttcgaatccaacctgggcaacataatgagacacttgtctcttaaaaaaataaaataaaatttttaaatgaaacgaagtaacatttttctgccctgttatcatctttataatatattaattccatgagggcaaagactctatcttattattcttttagtaccaggaccggtactgatagataaaggaaaaaactttatccaaaggatgaactactctaaaatagaccagtctctagcatctcatattccttctcagattaaagaattatgtgactattctttcttacagagaaacaggcatttgcaaaaagagtaatttccacctcagttcagcaaaagtacacaaacttaacactttctaggttcaaaaacttgggatggggctgttcagggtgccttccagatttagatgctagaaaggattctgccagttatcaaatgttcaatggcccctgtttgtcaaacccagtttggctggttctccattcaagaaaacaatggggtttgtaagaaagattctatagcacaaaatgaggagagcactcttctgatgaattagaaaaggcattattttcaataatttagcacaagaaagagaaaacaatcaaaatatctgcatgcattagtccattttcatactgctatgaagaaatacctgaattccacccatggtccctctc

SEQ ID NO: 226 - DNA, 1775 bp, synthetic construct
  misc_feature 1..1775: note = Description of Artificial Sequence: Synthetic polynucleotide
  source 1..1775: mol_type = other DNA
gtagtgagccgagattgagccactgcactccagcctggtgacagagtgagagtccgtctcaaacaaacaaacaaacaaaaaacaaaacaaaacgaaaaaatcccccaaaacctactctctcttaaggagaaagaatagattgtacatagagcacagaacttggagcctatagacctggattcaagtcctcgctctgcctctaggaatgattttaaacaagcaattaagctctataaacctttattttctcatctgaaaattgagatagttatgacttcctaaactcactgtgaggattaaatgagataatgcacctgaagatatagcaatacgtgggcagtaaaagcaaataaacaggagcaaggattacatttgtattattatgatgtcaatcagagtccagcctatggcttgggtttgtgcttgtcaataagagaaagctccttgtgggtaagggtctcaatcaacaccctgcccatcccccatgggccttcagacaggagaatgggcatagcacacgtccctaaaatcaatcccgggggaactggtctgagccgtgcaggtaattctaacccgttcttcacacacgcttccccattgcttcggtaaaatgcacacaagagaggactttgtggttttgaagtgtctgaatacatttctagttttttttttttccccgccaattgtgtgtgtagatacagctcatgagaaaaggataacatttccaactccttgcctatcccaggggatttcccagagttggcatggaaggaagttatgccacctgctgctattagaggtggccctctggtcagcccagagagatttcttagaggaggctctgggatttgaggaggcagaggggcagtggagaggggatggctgtttctgttcagagctggtgccaccatgatggctggtattggtgctctctgatgcaaaatgggatattcctttgcaggtgattcctcctggaacaaaacacaagctaaacaggtatcagaggggctccagtacctatttgagaacatctcccagctcactgaaaaaggtaaactggatctggatagtaagggggttttgggacgagctggggtttttcatgtgatcggaaatgtttctgaggtctgcaaagccacatgtgactgggagggggaaaatggggttgaagtgcagagagcagtaccagtaaaccacctgcattaattacccaggtccttgggatggaaggctggtgctggagggctagaaacccaggaagaggggaaacagcctctgcagacagggactccctgtggagggagacccaaaccttgccctcaggaagtcctcagactgagggggagacatagcccctgctggggggagaagatgcagtcccctcagggaacactcagaaccgcagaggaagattcctgactgctcagcatttaaccttctgaatagtgaaaaatctactatcaaataatctggaagaggtcagtcaataaaaataattgaataattgatgatgttgtattaagctaaagtataacatatgatattcattaacccatcaagaaatattgcttgagttaaaccacatccctcaaatgagtatttctggtgctaattcaaaaggcaatagcagtcaaccaggggatgtttttaatgttttatgctttcactgcagtgctgtttatagaggggttagcagggcaataaggatcatatttaggaatgcagttcagtgacagctaaggcattgaactacaatcatgctgcacacagagcgc

SEQ ID NO: 227 - DNA, 1767 bp, synthetic construct
  misc_feature 1..1767: note = Description of Artificial Sequence: Synthetic polynucleotide
  source 1..1767: mol_type = other DNA
tactctttgaatggcaatgcaagtcagaaggccaaagggaccttaataaatcataaagccgtaaattaatttcttctacagaactttaatcccaggtctttttaaaacttactggccattcagtctgtgactaggagcttctgttagtttttcaaacataatacatcatgctttctggaaagggctgtgtgcagtggctaacctgaccccccagattctggcatctcaaaatgcccacaggagtttctgaaccagaatgtgtggagcagaatttctccctaactagaggcaggctagttcccctaaaatccacatgttctctctgaaaatgtgcagtatctatgtgaatcagtacttctgcaaaagtcatgatttaatttaacaatgttgattttggttgcctttaccgtacacgacgaacatattctgaaccctaaaataaaattggaggccaattcttcttcatcttgttcccataacattccagactcagattcaagaaggagattgtgccaaaatgcaaaacttttgggaaacaagaaaacccaggaggcattattaagcaatcagcatctgaaggttctaggttttggcccaacagcttatttaaacatgctttggagccaggccgacctggatttgaattcaccattgccaccttttctgtcactggacaagttcctttgtgatccaagtgtcctcttctggaacatgaggtggataggcacccacctcacaggactgggtccacacaccagcacctggcagagtgggtgctcaatgtgagcacatttgctttctaaattttttaaaggccaggcgcagtggctcatgcctgtaatcctagcactttgggaggccgaggcgggtggatcaccaagtcaggagatcgataccatcctggccaacatggtaaaaccctgtgtctactaaaaatacaaaaattagctggcatggtggcgcgcgcctgtagttccagctacttggaggccgaggcaagagaatagcttgaacctgggaggttgcagtgaactgagatcatgccactgcactcccgcctgggcaacagggtgagactctgtctcaaaagaacagggattctgtctcaaaagaacaaaacaaaacgaaaacaacaacaagaacaattaaaaaaaacaacttagagaaaggccacttatgaaaacattaagtagacatcgttaaatttggagaaaggagaaggggtagaggtgagaaaagggaaaatgtaaagagaaaataaaggcttccttattttggtagaattccatgtggtcctttacaaactttaacgtgcatacaaatcacccagggacattgttaatttaacatgtgggttctgattggatagggtcgtggagtctggaattctccatttctaatccctctccaggcaatgctgatactgctggttcaaaattcgtttcactggtaacagaattccagcctcctttattccaggaattgcatggggtcaaaggcaagaagacccggtgcaatgggtggagaagcaggtggaggagtgggggccctgtgagggccagggaaggccatgtgagtgtgtggatgtgtggctgagggaaaggaggccagggatcaatgaagctttgctttttttttttttttttttgatggagtctcactctgtcacccaggctgggatgcagtggtgcaatctcggctctctgcaacctccgcctcctgggttcaagcaattctcctgcttcaggctagctgcacacagagcgc

SEQ ID NO: 228 - DNA, 1728 bp, synthetic construct
  misc_feature 1..1728: note = Description of Artificial Sequence: Synthetic polynucleotide
  source 1..1728: mol_type = other DNA
gtacgtggttggagagagccctgaagacaggccttgccccacacaaacacagaacaaattgttctccaccccctcccaaaacaaaacaaaagcagtgaagagccacagagtgatgaccactacaacggatacaggattgctgagcccttccacgtgccaggggctgggcaaagaatttcatattcattaacttatttctcacctcaactctgtgagacatgcactcttcccccactgacagattcggaggaggggaggaacttgccaaagaacacacaactgcacatggtggagctggaatttgagaccaagtggaccactaagctacctgccaaactgagttgcagaaaccccaaaggaggcatagaacacggtttccaataaacaagagctcatgtgggcacttcctaatgacagaagctaactgtccaagagcacgactgtcttgggacaggagatcatgctgcagagcccagggaggtccgccctgcgcagagagggagtgcagacctaaagagagccacactctgtgaaaagtggaaaaacctacagattgatcccacctgttcagagcaacaggcacggcttcactcgggaccacatgtgcccaggggctccacagggctgggtcctggctctggccatctctgcacagcctctgctgggccactctgtgagaggtcacgctggcagcaagatctcagcctctgctcctttccctagtacagtttgatctctgaattcactttgatcttttaccagttcggcttcacctcttgcaccaaagctgtgatttctcagggcaagttgtcagctttcctgtatgcagtgtttttctaggtggattgtttctgatgtggtttcctctgatgcaggtgagggaagtatcatcttgactcctccaccaataaaattattctcacagggctttactaaacatgagacttgggagggaccaggcgtggaatgatatcgtttggctctgtgtccccacccaaatctcattttgaattgtaataatccccagatgtcaagggtaggaccaggtggaggtaattggatcatgtgggcggttccccctactgctgttctcatgatagtgagtgagttctcacaagatctgatggttttataagtgtctggcatttcctctgctggcactcattctttctcatgccaccctgtgaagaggtgccttccaccatgattctaagtttcctgaggcctcccagacatgtggaactgtgagtcaattaaacttctttctcatataaattacccagtcttgggcagttctttatagcagcatgagaatggactaatacatgttcctacacatactcttggccataaataaagttctatagtaacttttcttcaaataagtaggcttctagtgaacccaaaaatatgtgagcaaaacataaatttataaatttatgactcttctagttgtttattgatgactgaaatatattctctagaaaatctattttggaagccaataatcagaaatttgttgagaaaacacggacagaaaatgatgaaaggtaacgtagaatcatctttatcagcctcaacaatcactatgtcaagtgatgtgaagtcaaagatgtcactgtagaacttacttccattcctcttcagggcaatgattcattaagtcctctccaccattggcggctgggttctagaagcattctaaaaaaggagctgcacacagagcgc

SEQ ID NO: 229 - DNA, 1724 bp, synthetic construct
  misc_feature 1..1724: note = Description of Artificial Sequence: Synthetic polynucleotide
  source 1..1724: mol_type = other DNA
gctgcacacagagcgccaaccaggaagcagaaaccataccattattttaactgggggatgcaattaaaatagacgttaggtattagagaaacaagaagacaacaaagcactaataaggaatcacatatgtaataacttcacaccttggctggggaagcaaaacagagtttgggattaatcaaatttaaaggcttggaagagaggtccatggggctagggttcagacctctgaggaggtgacaccatgtgcctggtgtttctgagagggcataaggagactgattgtggtaatgtagggtgcgaggaccctacaatctccccaaggaaagtgaaaaactgccactactggaattagctgtgtcttccagtgtgatgggccattgtggttcaagtttcttctccctctcccaatcttttgatttacctgtcgcacctccaaatggcagaacataaatgggaccagcagacaaaagagaagtgtgatttgcagagttcctgtcccagcttcaccaaacagaatgtggaccaggtgtcattacagtctcatggctgtaatgtcagcactttgggatgccaaggcaagtggattgcctgaggctaggagtttgagaccagcctgggcaacacagcagggccctgtctctacaacatatttaatatattagccaggtatggcggcaagggcctgtagtcctaactacttgggaggctgaggaggaagtattgcttgagcccaagagttcaaggttgccctcagctatgatcatgcctctgtactcctgcatttaggctggaacaacaacaacaaaaagcagaatcaccaagagtgacccaaagagtgaatgtagacagtgcttcaagtcctggaatactcccttgaggcatcaagcagaataggagcaaaggagacatagaaggaacaatcagtgaggttggaggaaagctaaaagaatccttgatagcccagtgaataaagcgctttaaagaagaactgtttatcagttgtatacaatgttaaaaaaaaaaactagtaaattgtgaatcaagaattaattaatgtatttcactatatatagtcattggtgacttgatcatttggtgaagtggtgggaacaaaaggccttttgggattttaagaaggaaatggagtagagaaattaaagacttcagtataaagagcattttggggattgcatacatagcattcaatatacatagcattttgctgtagtaggaagcagagaaattaggcaatatttagaagtcaagatgagatttccttttaaacaatgggagaatggaagcaggtttgtgtattgatgggaatgatgcagtagagagggaaatatggattgtgtaggaaactgactgaacaatttctgaaacaatgcccttgggatggcaagaagaggtggaatcaagtgcacacattaagagattttctttaggttggagcatggatagtgcatctctgatcatagaaaggatggtgagtttgtgaggacagatgctggaaagcatgcagatgtggtagaggaatttgttgacattctttcctggttccttaaaaccttgcttaaattttccatgtcatcgactgagagtgaggagagctgagaaaaatgtacgtaatagcgaagagagcaagtcagtcaatagataagcgcaggaaattagactctaactcttacagccgcagttttttcaccttcaaaatacagcta

SEQ ID NO: 230 - DNA, 1720 bp, synthetic construct
  misc_feature 1..1720: note = Description of Artificial Sequence: Synthetic polynucleotide
  source 1..1720: mol_type = other DNA
atgataaagtgggtcatttggtgaatctattctcagttcatatctgctttgagatagcacagagtcacactcgaacatcctgttccaacctcgaagtttcctggttttcctttgtgaggctgcaacaaaagtatatccaaatacacattgatactgatgaaagcatcatcatcattagcctctaatagtcatcgagtacttgcagtaccaggtattttgatgagtgttttatgttctcaatcatgtatatgtttcacaagaattccaaaagggaggcactattgcaatgcccattttacagaggcgggcccagaactcacagaatgaggctcatacatctcatacctgaggcttggacccagagctagtctcggaaggttctggagccctttgggctgggacacagtccctgctgggatcagggacccgatgccaccctctggtgagagaagcagcccagtttctccctgcccatctctgaagatccttgcagtttattcaccagttcattcaattctcattttcccagagacagtacatgtcacagaagattcaagcatactcctgaacaggaaacttttctgggactcaagtttctttacctgtagaaggggcttaatgatagcatgtattattgttagtacttattattagtaatagaatataagaggtcattgtgaagagtcactgaggcatggtatataacatgttctgcacattgtctggtacataggaaacattcattatattcattaaatagtagcgatttttattctgggtctaggcatagagatgcagctgggtgagagacatagactcccttgctctggaagccttgtgtcccctggggaagccacaaccagagtgtcagcatgcaacatgcaggcccacccaaggagaagcctcgcagaggggcagctaagtcagccaatggggccacaaaggcgcaaaggcgtcctaaaagaagggaccactaagaccggatgcatgctcaggagcagtccaggcaaggaaggagggatggtgtcttgcccaaaggcacggcaggtgctaacgtgggtctgctggggcaagcggaggcagacggaggccagcttcaagaggcctgtgcaagcccctctggaaagctgggacttctgggggcactggggacatggcacagctgagctcagagaacaagagggtagatagagaaggaagaggggctgtagagagaggtgatggcagagggaagagaggggcatggagaggggccaggtgagtggggtgccctcaggcactggatcagaaagtctgggtgtgggctggggcggtggctcatgcctataatcccagcactttgtgaggccgaggtgggtggattgcttgaggtcaggagttcaagaccagcctgaccaacatagtgaaaccccgactccactaaaaatacaaaaaaattagccgggcatggtggtgggtgcctgtaatcccagctacttgggaggctgaggcaagagaatcgcttgaacctgagaggtggaggtttcagtgagccgagatcgtgccactgcactccagcctgggtgacagagggagactctgtcaaaaaaaaagaaaaaagaaaggctggggtgtttaccatccagcaaagggaggtaaagtgatagggagaggggtcctcttttccaactcaaatggagatgccatatgggctagctctggtgggctgcacacagagcgc

SEQ ID NO: 231 - DNA, 1676 bp, synthetic construct
  misc_feature 1..1676: note = Description of Artificial Sequence: Synthetic polynucleotide
  source 1..1676: mol_type = other DNA
gctgcacacagagcgcagggttaaaggcatcttgcacattgaaattcaaaagcagattctttctacaaaccagttatttactgagatccttgagctattagtgtcaaagtgaaatagagtggtcagcagttatctagtaaattcttgataagtaaattaagccattcctaggcaataaaatatctgttcttgttaatggcagctttgcttctttttatcccagaacagtctgatgtttagtagccccagttattatacatgtgctcagacagaaattttcaaattgtcaattatttggtgaactactaacatgaatgtttaaaatattatgcttctttctacctctaatcatttatttattcaataaacatttagtaagttttagctgttttccaggctctacaccaagccctggggatagcgagaggagcaaaacttagctcctgcactcaagttcacagatattcataaatcattatagcaagtgacacataccataacagaattgtcctatggaaactcaaagagaagatgacagataagtacagaaggacgaagaggagtgtgctgggctgagtctggagaaaggacactcccgtcggaggaggtgcacctgcaaagacaggaagttgttaacacagaaagaacagaggaggtgatatcccgagccacgccatgagtatagaagaatgatgtgggaaaagaggctgggcaggccagtgaaggcatcctaggagcggtacagcatgccaaggagtttggacctccttctgcaaacagtggaaagccactgggagattttaagcaggacatactcagatttatgcttacagattcctctggaaacagttgggggcatgggctggaagggataagacttggggcaaagaaacaagtcaggaatttatacaattatccaggcaagaaatgatgatgatggcatattttttagccataaaaagaaacaaactactggtgcatgttacaacatttgaggatgaacctcaaaaatgctatgctaaatgaaagaatcaaatcacaaaagaccaaatattgtatgatgccttttgtgtgaaacgtctagaattagcaaatctatagagacagaaagttgattagtggttgcctggagctgagagtgggaacagaaagtgattgctaatgggcaggaggaatctcttaaggtgatgaaaatgttctaaaactggattgtgttgatgattgcacagctctgtaaatttactaaaaaaatcaccgaactgtgtatgtacatacattgagtgtgtttcatggtattgtaagcaaaatcttagtaattaaaaggctcttggtttagctctgggtaagatttgaagcagtattaagactccttctgcttttcggggtcctcttaggggcttacggtgagacatatcctgccattgaagatgacgtcctccctccaccatcacagttgccctctgcacgggagcgcaggaggaacaaatggaaaggactagacattgtatgtatgagacttttctcccccttttcaacttagaagaatgagaggtctgggttctgacctgtgctaaatctgtgtggcccaataaagagcacttgcttgaaattcagacatgggtctgaatctaggctctgccttgactggatgaccttgggtagctattgaattctgc

SEQ ID NO: 232 - DNA, 1653 bp, synthetic construct
  misc_feature 1..1653: note = Description of Artificial Sequence: Synthetic polynucleotide
  source 1..1653: mol_type = other DNA
tgttgggataattgcttgagcccaggaagtcaaatctgcagggagctgagttcacgccactgcattccagcctgagcaatcgagcaaaaaccctacctaaaaaaaaaaaaaggaggctggtgattcaggaatgatagaaaaaaaaggatatgtactcaaaggtaaagacttaataaaaattaataatatttattgcttcataaaggatatttaaaaaacttttttttccctgtgagttgatggtggtgaagcacgcaagactactagtggactttagtgcctcattgtactaagacactaacagttttacccattatttcttttgcactattagtgcaaatgtcaacacagtgaaaaacccaaatatgatcttactgtaattgtgaaaatagttgtgacctcataggcccccagatggggccttgagatcccccaggaatccccatagcacactttgagggccactggtccaggccactgataccatttcctttatcagtgacttaggaatgacatgtgactgagttcagatgaaggagatataatgggatttttcaacctacttgaaaatgtttcctcaaacataaaaagggccccataggaagacagagcatgctgcttctgctcgtcagtgtcatgttttcgtgtgcatcttggctttgaaagggaggctgcctgaggatggctgagcagatgccattgagccacagggctgaccgcctcgagttaccttgagtcaggacttaaagttctgtgaaattaactttacttaagggaagaaggaagaaaggaagaaaggaaggaagaaaggaaggagggaaggagggaagggaggaaagggagggaaggcagctataaattattttataaatatattaacgattaaaaataatatacacaaaatttccactagcatcacttttttcttttccaatcattaataaatatattggctgtttactgtggaaagagcattgatttggacccatgggaccttggttccagtcctgattatgcctacaaatgatttagggaaaaacatttaatttgtctgactgtcagcttcataaactagattgtattgcatgatttccactgagcctgaaacttgcacattccttgacatttcctccaggagaacctttggaaagattttctttgactctcaattctaatgaaaacttcaaatgacaaatttgctgagtgagcatataagttttttattgctctgtaacaaagtaccccaaatgaagtagcttaaaccaacacaagtttattatctcacaagttctataggtcataaataggggcatgttatggctggattctttactcagggtttcaatgtactgaaagcaagacattggctggagctgtggttctcatcttggctcaggattctcttccaggtttacttgtttggggcggaatttcttttcttgcaactccaggactgaagtccccattatctttctagccgttggctgggatcagctctcagctcctagatgctgcctgcagttctttaccatgtagcaaccatagacaattcacaacatgagtgattgctttctcccaggcaacctgcagcatatttatgactgtcttctgctacctgcctgcagaaaatagtgcttgctgcacacagagcgc

SEQ ID NO: 233 - DNA, 1621 bp, synthetic construct
  misc_feature 1..1621: note = Description of Artificial Sequence: Synthetic polynucleotide
  source 1..1621: mol_type = other DNA
gctgcacacagagcgccaagtcaccaaacctttctgcagattgtgatgactaatcgattcaatcaaacccaaagagatcagccaagagtctggcacacagaaattccttaacaaatattagttcttatgtatcctacaccttgtgtttatagcaagccagtctgcttgtggcagggttgcttagaaatcatttgacagtgtctaaacagtcactcccaaagttgttgaaaaattgacagtctgtagttgcattttgtaatgtttcttttagagcaatagggcagtggttttaactgaagcacgtttaaactgactttgttttgagaaattttagcaacttcataactgaaaaaaggcaagtgacttccaatgagtagcggagctgagatctggacctttcacctttctcttcaagtgggttgtgaggccagcaaattcaaaacccacagaatagagcatggagagtggggagtggggcatggttgccttgctgctgtgaccctccggatttaccgggacggttgagcaatgtgtagtgatgatgttaacaggcagttcaatccagtgatttacatttgcttgcaaatagttcttaccccaaatgacaaccaaaagaaatgttgttgagatgcatcctaacggggagtcgcttcctaggtccacactcctttctgtggctgcagtgcctttagggtgtctcaaagaaataccacgcaagggccgggcgcagtggctcatgcctataatcccagcactttgagaggctgaggcaggtggattgcttgagcccaggagttcaagaccagcctgagcaacatagcaagaccccgtctcaaaaaaaaaaaaaaaaaatagaagaaacaaaaatttagtatgccagaagcacatgctaagtgaatgataatagtataaaaaactagaaaaccaggttgcggtcagattatggagagacggagtgctagacaaaagagctaaataattggcggacaaaacaggccatgatcagaactttctgtaatgaatgtgaatttggcagaagaatcaaagggcaaagaaacagtaggtgatgaaattaaaggtaactcagtagtctaggatgacagtgagggtaaccagacagtgggaataaaaggactacaagagtataatagagaataggtttggcaactgaaaaaatatggatagtaattgagagacgagtcaagatcacaaggcattcccatgcctgtgtgacagtaagcaggttatacctttaaaacatataggaaccacaggaagaaaaataaattttatgaaataaatatgctttctgaattatgtcttttatgcattgttattaaattttgtttaatatttaacagtcacataaaaccacacaaaacacaaatttttctttttttctttatgtcttttttctttatgtttttctttttttctttctttttttatttctgtcaaataagaggatggaacgtattttacttaacagttgcttatttgatttattattgacatctctgacaatacatctcattgtcagatgtatgatttgtgtcacgcgcatccttgtgaagagaccaccaaacaggctttctgtgagcaacaaggctgtttatttcac

SEQ ID NO: 234 - DNA, 1608 bp, synthetic construct
  misc_feature 1..1608: note = Description of Artificial Sequence: Synthetic polynucleotide
  source 1..1608: mol_type = other DNA
agtggggactctgtgtggggcctcccacagcacattacccttctgcactgtcctagcagaggttctccatgagtgccccgctcctgcagcaaacttctgcttgggcattcatgcattttcacacatcttctgaaatctaggtggaggcttccaaagctcaactcttgtgttctgcacactgcaagccaaacgcaacattaaagttgccaagggttggggcttgcaccctctgaagcaacaccctgagctgtaccttggcaccctttagccacagctggaagtggagcagctccatgtcctgaggctcagttcctgcctagagatggacaccgctgtccccccagggccaccagcaccaggaccctctgaagctgccaggtgcccgtgccccttggggcctcctcccaaggcccttgctcttctgcaccgaaggtcatgcctactgccccgggacactgctaactagctgtgggtcactggcaagtgtgttggtcattgtttgtgcctccgacagtgctctatgcagtcaccactcaacctggttgcacctctaagtcctgggctgcagccaaggtggctggatttcctgtgcctctgagctgctagctgctatggacacagccagatgctccaaggctcctgatccttgtcccgagggcatgtgaaccgacacagccaggaggaaaccggagcgctgactgctgcaggtgcatgtgcttgtgcttatgaaaagtggcccttttctgaggccgccaggtgctgctggcagcctgacccaggctgctgagggacacacttggatcaacatgctttatactgccaatggcgacctgggtcacctggcccggctagggtttgtcaggtttcttcactgagaagatgactcttctcctgtccatgctcccttccatacttacccttaggaaggaagtcattatgcacagatgcacagcccacgtttaagcagggctgcacacagagcgcataacttggtcccttttagtcacagctagagctggagcagctgggattcagggcaccaagtcccaaagttgcacagagccatgtgggcccagcccacagagctattttttcttcctcctaggcctccaagcctatgatgggaggggctgccatgaagatctttgacatgccctgaaggcgttttccttattgtcttggctattaacattcagctcctcagttacttatgccaatttctgcagccagcttaaattcttccccagaaaatgggttttccttttctaccacatggtcagcctgcaaatattccaaggctttatgctctgtttctcttttaaacataagttccaatttcataccatctctttgtgaatgcatataattgaatgctttcagaataagccaggtcacttcttgaatgctttgctgcttagaaatttcttctgccaggctgagcgcaatggctcacacccatgatcctagtagtttgggaggccaaggtgggtggattgcctgtgctcaggagttcgagaccagcatgggcaacatggtgaaaccccatctctactaaaaatacaaaaaattagccaggcatggtggcgcacacctgtagtcccaactgct

SEQ ID NO: 235 - DNA, 1603 bp, synthetic construct
  misc_feature 1..1603: note = Description of Artificial Sequence: Synthetic polynucleotide
  source 1..1603: mol_type = other DNA
gctgcacacagagcgcttggccagcaaaagaccgtggaaaggttaaaaatcaaaggtgaatatttttaggtaaatttagggtctgttcctacagatactaaatattttagtctttgcatgtcatatagtctctgtctcatctactaactctgactttgcagttaatacccagcagtgggcaatatatcaataaatgggcatggctccgtttcaataaaactttattataaagacatggttggctgaatttggcttataggctatagtttaacaatccatggtataagacagaccagtttgtgataaaacaaaatggacaaaattgtgtctgtgtctgtgtgtgtgtgtgtgtgtgtgtgtgtgtgtgtctgtatgcaaaatcaatggaactgagaggattccaattcactttaaatattttcaaatacaataatgttgaagttacaataaagttatgttatgtttgatccaatacttgcatgagggtatgacttagtgcgtttaaacagcaacatcagtattattttccagctccccaagtgtctgctcaggctgccacaacaaaataccatagagtgtatggcttaacagaaacttatttctcacagctctggaggctggaagtatgagaccagggtaatcacatggtttctggtgacagctgtctgatttgcagatgaccaacttcttactgtgtgctcaaatggcatggcagagagggagggagagaaagagcatgctctctggtgtcttttcttgtaaggactatcagacaaaggctccttcctcatgacctcacctcatctaaacttaattatatcttgaaggcccctgtagtgtgaagggtcccaatcagcttactaaaaggtttatttctgctgcccaaaccctgaaggccaggccatgagccaaggccatgttgcccagccagagagcaggtgtccctgagaactcaaacattccagacagtatctgagaacctaccaagaaaaagtctcatcgcttaaacacagtaagcaaggagccagaaaattagctgaaaagtactttaaaaataataagcggtgcagatctctacagctgtcctgctgttgtcccggagtgcctcctatgtgaatcctaataatctcatctactcgccaagctggacttctccaagtcatttcttgatctcttggctcactcccagtttgggagaaggtatttctatatgattccaggattttctccttacagccccatcttcaaatactatcaccttggaagatagtgcttcaacatgtgatttggagggtacatgaacattcagttgatagcattctgcccctggggcccccaaattcatgcccttcatgcatgcaaaatccatgctttccaacctcccaaaacaacccttatttctttgaggacccaaacagcctttgtagaactaacaaattagccacaagattagaaattatggctcaggagtcatgtagccagaggtcacaaggctcataacctccctaactgcttctatagatagcatcactattgtaaaacttaagactggtgtgcaagacccttcattctgttggaccagctggttccacctggactggta

SEQ ID NO: 236 - DNA, 1564 bp, synthetic construct
  misc_feature 1..1564: note = Description of Artificial Sequence: Synthetic polynucleotide
  source 1..1564: mol_type = other DNA
gcctcggcctcccaaagtgctgggattacaggcgtgagccaccgcgcccggcctgttgttttattatagaaacagaaatagagatcctttatttatgttgaaatctcctaatcaggaccccttgccacaataaacaatgaggtgcgtaagtaagaaagaaaaagtctatgtaaagagacaaatataattatctacattgcaagtttacttttaaaagagcctgaaatataaaatggcaaataataaaaataaatataacaaataataaaaatgcttttcagttttatgtctggttaagtgtgagaaatatatatatatatgaagtaaaaataggtgtgaagaaatgaaaacataagcaacgttagagatcccctaatgtaggggaggacctagaaaaaagacggaaggggtgatcaacctgcattaacagactttcagggaataatattctaattatattgttttaggatgttgctgagattttaaaatcacattgcaaatttataaccttgaacataaacaggtagctacatctaagtatttttccacccagattaactagttctgagagaactggaggctaggacttgctcacagaactgaagttccttattcctcttactagaaaaacaaacaaacaaacaaacaaaaaaagatggtccaatctttggcctggaagttggaattaagctcatgcaaacctgaaaatgttgctttctctcatcattaggtagcctaaggcaaagggagagaaagttcaccttatatgtgccttttccttaagtactatctcccctgcagcaggatgactttgcgttgaatatctaggtgcatcattgtgttgttaatttctccgttttctcctctgtggccactgtactttggtatagggctgtcagaaagaaaaacacacggcatgggcttagcatctggctgaagcctaaataagcagcactgccagacatcagaatatatcattactgtgatagttatgtttaaatgtgtggtggtgccattgaagttaagctcaaagttagctatgaaaatactgtgcagaaaaggttgaaatattgacatttctaaaaaaaaaaatctaaacatgtggatatatttttaaaattctagattattcttggcttgagtatataaacaaatactcctagcagtatattaaagaataatgtactatgttcataaatacgttattagaggaatgtaaaattagataaatgttaagaaatgtatcaatgaaatttttacactaaatagattaaagaagaaaagccatattctagaggctaagagggaatttgatacagccattctaaattttaaaatcttgataaaatagaaatggaatggaacttctttaacacagaaatgaatacacaaatagacaaagaccaataaagccagttccattaaagtcaagagtaatataacgatgtccaccacccttaatacttcatgaggactattctaaagggtctaatcaatgcaatatgacttttttttttttttagatggaggcttgctctgttgcctagagctgcacacagagcgc

SEQ ID NO: 237 - DNA, 1550 bp, synthetic construct
  misc_feature 1..1550: note = Description of Artificial Sequence: Synthetic polynucleotide
  source 1..1550: mol_type = other DNA
gctgcacacagagcgccttgttgaaggaatgatttgccaggggaaaaaaaaaaaagaaagaaatagtagagacaaagtctcgccatgttgcccaggctgatctctgtctcctgagctcaagcagtcctcccaaaatgctgggattaaaggcataagccaccgcacctggcttcttagccatttttagagctactttgtgaactagatttactttgtgcatcttaaaaggaaaccaagtgtttgctttgtattgactttttttgttacatttctgcccagtgcggtcagttggttatttattccatttccccttatttgtccctttctacctgttagagtctattaaacgtgtatggatgcgttttctgatctacaattttaataatacttaattttattaatacttttgtgggttactgtaggaaatgagagattcagcaagggaattctgagttagaccatagctgctgcttaaccgctgtcatggtgtctgaacagattcctgctaacagtatttggttcaagaaaataagttatgtctttttaaagctgtcttagtgtgttcaggccactgtaacaaaataccatagactgcttggtttaagcaatagaaacttattttctcacagttctggaggttagaagatcaagatcaggatgtcagtgtgatcaggtcagaagattcccttgctggcttgcagatggctgccttcttgctgtttgtctcacatggcctttcctccgtgtttgccaatgccctttctttagtttctatgatattacatcaacctggttctttattctttgtaattattttgtctctctttatttgattgttttttccctcctgttttatacatgtaggcatgacccaagtttctgtccccaatctttcttccagtctccagtctaagtgtcccataaattcagagtgaccaaactggagttcatcattgttctctacagctggaaatcagtcttcctctttatttccctaattcttataatgacactgtcatttttccactcacctagtcttatatttccttaaagttatatttgacttctccattttccgtcgtcccctgtggtcagctatttgccaggtccccttgattctaccatcacaatatttttcatccttcactctttggtttcaaccccactgccttgtccatcattttattagactattataatagattcgtaacttacttttatttcagtttcacattgattcattaacttttctccattctatattctgccttgacttgtcagattaatattactaaagtaagaatttggtcattcacttgctaagaaagtacaggtagttattaagataatgccacaatttgtttccaatttattctactctgattctccttcagcgtttcattttccaaaacatgttttggcattcttcctttgcacatgccatttctgttgtcttgagtgaattaccacctataacttagaatcctactcatctttcaaggcttaattcaagtactgccttttcctaggattgcccagctacttttgtt

SEQ ID NO: 238 - DNA, 1521 bp, synthetic construct
  misc_feature 1..1521: note = Description of Artificial Sequence: Synthetic polynucleotide
  source 1..1521: mol_type = other DNA
gctgcacacagagcgccttaaggccctggatgcattggggatatttaactcgtcaggtagtttacggtttgttctgtatgcgatattaagtgcaaaagaagttgctagtttctaaatacataatgcaatataattttgcttctgctgaaaggcaaatcagaaataatcagctcgctatagtcgacaagtaaaaggagaaaaaacttttatcattttaataagagcagacaaaggattgaataaaatttagtattgattcatgcaaaaaaaaatcctaacaaatgagaacaaaagttccagcctaacttttacctggattaacctccctgttctgtcccatagccgtctcttaatgatgagtcaatgaatgttcactggacttagttacgagccactcttgcttgtcatttaaatgtttaaaaaataactgaataagtgaaaactcaagagtcgtataaaatggaagaggtagttctgtacacagaaggttggaagctcagttcctagggtcagaattagtaaacacatgtgactgcaaaaagtcaacctaatagactagagcaaagaagcatcaaccaggcagaatgacttacaataccatttataagccaatgactcccaaatttctagttccatcctagacatctcccaaactcgtctcaaatattcaactgtttattcgtcattttcctcttatgtatccaaaggacacctcaaagttaactgtcccaaactaatttatttattcccccctcgcccccaaaactgccccatctgcagcctttttcctctcagttgacagaaactccattctttccattctaactcttttctctcatactccatcaggaaatcctgtgggttctacctttaaattacagatagtccctgacttggatttacaatttttgagtttgtgatggtgtgaaagtgatgtgcactcagtaggacatcaataagttacatgaaatattcaacactttattataaaataggctttgtgttagatgattttacccaactgtcggataagttgtctgagcatgtttaagataggctaggctaagctatggtgtttggtaggtgtattatatgcattttcaacttatgatactttcaacatacgatgggtttatcaggacataaccctattttaagtcaaggagcacatgtatttccagaatccagccacttgtcaccacctccaatgctctaccttggaataagacactactttctcctggattactgcaatagtcccctaaaagatatcccttaattctctacagtttataattctatgtagcttatttatagcagccagaatgatctttttaaagcataagtcagatcatgtcattcttccacccaaaactttgtaatgacttcctcctttactcaaggtaaaagaaaaaggccatcagatggtctacaaggccatacatactctgaccccattagctcctctctaatttacactgctccacccacagtggcctccttgtttcttgaaaacaccag

SEQ ID NO: 239 - DNA, 1504 bp, synthetic construct
  misc_feature 1..1504: note = Description of Artificial Sequence: Synthetic polynucleotide
  source 1..1504: mol_type = other DNA
gctgcacacagagcgcccctgccatccagcccacccagagtctctggatgggctggctggtgaaggactttcgttgccaaaactagtctgtaaagattggaagaggtgcctactccttctaacacagagataacaatacaaggccataaggatcacaaataatcaaggaaacatgcccccaccaaaactaacaaacaaacaaaaaataaataaataaagcactggtaaccaaacctgaagaaatggagattacctaacaaagaattaaatatgatcaacctgaagctcagtgagctatagagaacgcagatatgcacctatatgaagtcagagaaactatatataaataaaatgagaagtttaacaaagagatagaaaccataaaaaagaaccaaacggaaattctggagttgaagaacacaatcactgacctgaaaatttccacagagaacttcaacagcctaataatatatttggcagggtgaattaatgaatgaatgcatgaatatcctaagtttacatatattctttatcagcaataagcatttgaatacattcctctggcccactatagcagctgctataatcatactgaaaacatttacttctagtactctcagaatataatacaataaattgttttaaagctacaatgcattaatcaaccagatttcaaaatttcacactgctactatcctctaataatttcagaatcattggaaacaatcttattgtctccccttttcttcctgggctcacaaatagtgataccaagaatgattttgcattttatggttttagagagatctattacatactgcctaaacctaaatatccacttctaccttgtcttaaaacaagcatgaaaaactttagccttatgaataataaaatttattgttataatatatagacttatctttgtctttaaagagtcgcagcaaggaacaaagttaaaatgcaacagaaattagtggtagcacaaaattttagtagctaaactttatgttaatttctttcattttaggctttgcttcctttctgacaattttgctaatttagcaaagatttttctcaacataggaaaaaactaaagtgtgttcctattctctcactcaacaatcaacacagaacacttctgtgaccaaacgtataggggtgtaccccacattccaacctccagttcagcaaattctgacatgatctacctgcaggtagtgtctgaccccacagattcagggctcattccacatggcagcccctcctttcttttttttttgagacagactgcagtggcgcgatcttggctcaccgccacctccgcctcccgggttcaagcgattctcctgcctcagcctcccgagcagctgggactataggcgcatgccaccatgcctggctaatttttatatttttagtagagacggggtttcatcatatggtcaggctggtcttgaactgctgaccttgtgatccacccacctcggcctcccaaagtgctggg

SEQ ID NO: 240 - DNA, 1474 bp, synthetic construct
  misc_feature 1..1474: note = Description of Artificial Sequence: Synthetic polynucleotide
  source 1..1474: mol_type = other DNA
gctgcacacagagcgccctcgcctcagaaacaaacaaaaaaagtgttggtataaatgtataaatgcagtgagagacgcatgtgacaacagcagcccatgaagggtgtgcaaagggaacatggggtttccttccgggtgtgtgcacagaggggtgtgtggaggaaggaaaaccacacaggggattgacgaaggattcaatacatgaggggctgctgtgaagtatctgtagggaaaaggagatggagatgaccaaaaaaagtggaaggaggactgcgtcagaaaaaaacagaatggggaaataaaaaacattaattgggaaaaagaggcagagaagtatatacggtattgccaccacataccatggactctcaggactggttggatttcaaataattttctttcccagtaaacaaaacttgttaaatattatgaatactaaatgtatacctaacagttctgatttataaatttattcttttgaaaacaggtcgtttttggactatgtccttgtatacaaggagcacagggggagcaaaagagcgagacacgggtgtgccgaaggatgggggtcaggaggaactgcaaagcagggaactttgaagtgggacctggttttagtccgaaccacctcggctgatgaccttgggcaatcgcataacctctctgagccacggattccccacactcaaaacgggcagggaggccgtgggactggcccgggggatgcaggcagagcgcccagccccagctcggcacagcgtgggtggcagggcgcctggagaacccacagaggcggcggggagtgaggggcgcagaccgcaggtactaggcgcccaaaggctgaccggcgggaatggcgcaccttctgggagccagaagacgccgagatctgggcccacaccgctctgccgcccatgctttccgcaaccagaagtccaaaaccctcggggccggccgcccgggcgcggcctggaggccttcagcggccgggtccccggatccctggcccgggtacctggcggcgtgcagcgcccgcagcgcctcgcgggcgaactggtccgtgccgaagaagagcacccgccagggaggcttctcgcggactctggagtcccggcagtcctcccagccgagtcgggccagtgctcgccactggggactcggcctcccacgcctggcgccatgagccagcggaggaccccaacagcgccgcaccaacaccctcatcgcctcggccgccggcggccggccctgcgcaggcgcatcggggcggggacaagggtgcagcctggggagggcggggcttgcctgcttggaggcggggtctggttggagttggtgaacgaatttgcccgctacagcggccctagatttttgttctgtttatttgcactatgtagccaatcctccagaataagtctttcttttctttttaaaatcgatttatttatttatttatttatttatttatttattt

SEQ ID NO: 241 - DNA, 1471 bp, synthetic construct
  misc_feature 1..1471: note = Description of Artificial Sequence: Synthetic polynucleotide
  source 1..1471: mol_type = other DNA
gctgcacacagagcgcagatgattactttttgttattttggtcagcaaattagtaaagtcagagggtgaagttgggaaaatgccagttagcttgtggaaacttgcaggcttatttctaaaacttttcaggactgatgttaattacacaggcatctgaaaagcaaaaatgggttttaaatgaacactatcttagctgtctcatgaagaaaagagagggaatgtttaaactgttcccatctgtgtgtaacaaagcttttctctcaggggaaaaacacagaatagaggtgcaaatgctgagctacctcattttagactttctaaagttatataacaacatgacaaatatgtgctactggaaaatattgtaggaaaggattagttttctcttccacactgtcttgatagaagaagtaggtaaggaaaatctaattttttaacgtttttttccagcagtgtatgttaagatatgaatctgtagaaatacattctttagataattaaattgagatacggaatttcaggcaataggctcttcattcaaagaaaaagagtaaatcaaatccaaagcaagcagaaacaatctaaaaactaaacctccttgtcatcttccctggtctcctagaagcagtatattcagggctctgtagccagccaggaagagaagtgaagaatcttgaccccaggatcccagtggtcagggcaaggagtccagtatcgctgggcagtctgccccacaaggagaaagtccctgtttaatcctctgacaaaacagaacatcaatcaagctatggcagttccatctatttcatatggaagccaagtgtgggaaaagaggtacattctcacttaaccaatgatcaacatcaaactctgcatagaatgttcactctatttttgctttaaatgagttacactcatttaatttatagataaaaagctcagaatatttcattgaagataacctgtctatacagcaaggtgagtcagggccagggacactgggttccatcaacagaatggaagaggccgggtgcagtggctcatgcctggaatcccagcactttgggaggccatggcaggtggatcaattgaggtcaggagttcaagaccagcctggccaacacggtgaaaccccgtctctactaaaaatacaaaaattagctgggtgtggtggcaggtgcctgtaatgccagctacttgggaggctgaggcaggagaatcgcttgaacccgggaggcagaggttgcagtgagccaagatcataccattgcactccagcctggacaacaaagagcaaaactctgtctcaaaaaataaaacaaaacaaaacacaaaaacactagaatacaagagtgaggaacagctgcaaaataaattgcccatggctacaccaacattagtggcgaaacctggccagaatgcagatctctagatttcctagtagaggaagatggtgagaaacagggacctt

SEQ ID NO: 242 - DNA, 1425 bp, synthetic construct
  misc_feature 1..1425: note = Description of Artificial Sequence: Synthetic polynucleotide
  source 1..1425: mol_type = other DNA
gctgcacacagagcgcagtgcatgtgtgcgtgcgtgtgtgcatgtgtttgtatgtgcatgtgcgtgtgtgcatgtatgtgcgtttgcatgtgtgtgtgcatgtgtgcacgtgcatgtgtctgcatgcctgcatgtgtgtgcatgtgtgtgcatgcgtatttgcatgtgtgtgcgtgtgtgcatgcatacatgtgtgcgtgagtgtgtgcatgcatgcatatttgcatgcgtgtgtgcacgtgtgtgcgcatgtgcgtgcgtgtgtgcacgtgcatgcatgtgcatgtgtttgcatatgtgtatgtgtgcatgcgtgtgtgcatgtgtgtgtgtttgtgtatgcatgtgtgcgtgcgtgtgcatgcgtgcgtgtttgcatgcgtgtgtgtgcatgcgtgtgtgtgcatgtgtgcatgtttgcatgtgtgtgcatgcatgtgtgtgcatgcatgtgtgtgtgcgtgcgtctgtgtgcatgtgtgtgcgtgtgtgtgcacgcgtgcatgtttgcgtgtgtgtgcgtgcgtgtgtgtgcgtgtttgcatgcatgtgtgtgcgtgtgtgcatgcgtgcatgtgtgcgtgtgtgtgcatgcgtgtgtgtgcgtgtgtgtgcatgcatgtgtgtgcgtgcgtgtgtgcgtgtgtgtgcgtgcgtgtgtgtgcatgcgtggcagttttaagttactagtttttaaagtcagcacattttcattgaatcaacttggtcaaaatctattacagaatttggaacccattaaaggaaagttcagtgagaagcccgtgtcttctcttggtcaacaatggaacttctatggaaatacttaggcaaagacttgagtttcctttgaccaacttctggtgttgaatctgctgaagcttgataggaatttgatcattctcggttagtagtttttttctgggtggaattgctttttcactacctgtgtgtaaggggaggaatcatctgtcctaaggacctggtggaagctgaaaggggctctgtttgtttctacagaaaagtgaagagtaagtctgtccctaaactgcctgggcagaaggccggcttctcccggcaaaggccacgtgacacatggagaattcaacagcaacactgagtaaatgtgttggaatctcacattttagtttcccagttactgactgtgcattcccacatttacaattattgaagtacgttcaagaatgtagagtgtgagctttatatagtcttgagcagtgccctgcttttaagagtgaattattttttaaatggaaatgagactcatctctcctggatctgaagcttgccgtcaactaccaggacctgagactcctcccggcgcttcccattttcctcaggaggaagccctgttgtttcagtgggtgtgtggtgaagggcaagttctcctagctgcacacagagcgc

SEQ ID NO: 243 - DNA, 1424 bp, synthetic construct
  misc_feature 1..1424: note = Description of Artificial Sequence: Synthetic polynucleotide
  source 1..1424: mol_type = other DNA
gtacaatgttgccagtcatggatctgcctcacaggttcactgcatgtgaagtgtctagcacagtgcctggaacgcagccggtgctccttcaatggtaacttgtatgttaatactacaattattattgtatctgggtgatcttgggactcagtctcctcatctgtaaaatggggttaatgatgatcctgagggccccagctatccacacctgataccaaagtcctccccacttaccaccctctccctgtggctgctgtctgactgccctttcctttccggatgtctcaggacaaagcccagagagagggaggaaagaaggaggcaaggaaatagatatctcactgtccatccatcagttagcaatggtggcaccaattttcatagagaaggggaatgtgcaacgtagccagaaaaatatttcctctgtgactccagcagcccagctgttcccttccaggaaaagtgctgagggccaaaaagaaaataaagggaacaatgagagagagacaaggaaagaagagagagaggggtgagagggaagggcaaagcagttagggacaagaagggcatggggcgggggagcacagaggtgtgcaacgttttgccagggcctttcccgggctgcctggaacagcactcagcaaggctgccattgacccagcccctgctctgacctgccagctgccagcaggcccaccctgcaggaacctgggttcaaaggcaactgtgatccttagcactgtaattgtgcagactccactttgtccaccctctacactcacacctgccattccttcctgctagaatgtttgaccccctctctgcctgtcaggatcctacgactcctgcaagactgtctcctccagggagacccctgggattctgtccccccaccaccccccagctgcctttcccttccctccttgccattttcctccccccgcccaaaccccagtccaactgtgttagctcacaggccttcacttggctggggcttccgaggctcctgtttcagcctcaggcctgactccttcctgagctgggagcccaggcctcagacttcttggacctctttcccactgagtacttcagccagccaccctgagagaggagccttggtcacagccccacagaaagggggtctgtctagtgtccccaccagcaggtcccaaggactgagcccatggcctgctcttcacttgccgggggtagcgtctctctttctttttctcacccttcactaggttcatacctgatgcccctataacaagagacagattaacaagagaaaagcagacacatttatttaatatgtcttatgtgacacaagagccttcagaaatgaagacccaaagaaacaggtaaacttggatccgtttatactgagtttgatgaagtggataggcatgctgcacacagagcgc

SEQ ID NO: 244 - DNA, 1399 bp, synthetic construct
  misc_feature 1..1399: note = Description of Artificial Sequence: Synthetic polynucleotide
  source 1..1399: mol_type = other DNA
gctgcacacagagcgcaggattctcaagttgaaagaaacaaattagtttgatagaatagtgaaaataacaaataccccagaaactgttaaactttcaccaagattctcagttgttaggactcatgtttttacagttgtattagaggcaaaaaaaaaaaaaaaaagataaatgcacttattttcagtccttcccacgcctaccaccttctttgtacatgtaaccagtttattctttgacacataattgtacatatttatcagctacatatgatattttccatacaatgtgcaatgattaaatcaaggtaattggcatatctattaccacaaacatttatcatttctttgtgttgagacattccaaatcctctggttattttgaattttatcacaaattattgtgtaaacagtttactcttgagattcgaattgaagtaaacctgaaacaattttattttttcaaacgtcttatgcttatgatagtcttcagtggagtggagaaaccctcctgttgattctagttgaagaaactggtatcattacggaaacttaatttcctattattgttggagtggcaatcacacatactgagggaatattcaacttgttttgaaataaatctcctttctatctcctgccatcagcttaaagaaaaacgtcctttgaataattgcctaaaacatgctatttatttctgaaattaacagaaagggcctgtttcaggattcacttaaatcatttaactgccacagaaaatacagaactctgaattacggcttttcttaaacacataaaatctatggataagacggttaagccctgctatcaaatcctcataaccctgtatgcaaataccatgcttacagaggatcttcatctacgatctaatatcttcatttttaaatgagctagctaaaggttctgagttcattattcctatctctttattctcattcaaattattatgttaacattaatctatttattagaacacctttcagctaagaaaattaaggagctttgacaagcacaaactaaatattccctgaagagtaggttggcacaagctaagatagaatgaaaggtaagacaaaaaaacaatgtagaggttcaattcctttgctcaagctcaatcagggaaacagtcagtgtctactttatatccaacaggttaaccctttgcaaatgaaagactcaagtggccaaatgacacttacttctcagacaaggtgtttgcaaggataaactttgagacaagagaactagccttaaattgaagagttcctgacaacagcaatttgacaagcacctaactggattatctcttaaatccagtttataattggtccactcaagtatgtattttataatagttattgacacatatgatatagtgctg

SEQ ID NO: 245 - DNA, 1395 bp, synthetic construct
  misc_feature 1..1395: note = Description of Artificial Sequence: Synthetic polynucleotide
  source 1..1395: mol_type = other DNA
gcgctctgtgtgcagctatttaggagactagcatgggctggaaatacagttttgggaggtgtcatggttacaaccatgataatatatggattagacatccttcctaactcttccactgatttgatttggggcctcctgtcaccttcaggatagagcccaaaccactagtcatggctgccaggctcccagacacacttcccttttccagcctcttctcttggccctctccacttgtagtccatgccgtagactgtgcaccctggacagtgtcacatagagtgctatgggggtggcaccccctgaagttcaacagcacggaagccctgactggtatgacatggttcaatgtccagagtttaattttaagaatcaacaactagacaaagtaatgatattgcatagtgggccatagtcagttactttaaaaacaaacaaaaatgtcacatttttaccagcaaatttagtatgtgttgcttggatttgggtcattctcaaagctgcaatagacatttatatattctattatttacaacatttttctccctttaaccttcactataatcttttgggtatggtattcatttaataccattctcaggtactaaatgaaatgaggaaaccaacattcctcaagtgtgaataactaattcaagacctcatgaccagacagcaaagaaagagtgtgattccaagattccaactgcaatttatgcccttttctcatgatttcatgttgccactctcattatgtattctttaagtaaaacttgcaggaatcactttatagcaatataatacttgaaaataggcagatgaaacataaattgtaaaaaaaaaaggaagaatataagcttttccttatctgtgtaatataataatgtcaacaatgtatgggttgtttttaggcactgatgtcaggtttaaagtaaagcaaaacaaggattacttaatacaattttaaaaaaggctaaaagtatctgatgcactaagatgaataaatttaaaatgtcaaagttcacaatccatacgctccagcaatgtaaactgaggccaaaataacacattttttgagatttattattaaatattatggcttatacaggataattaaaacattgtgtgtgtaatatgtagacactaattgtcctaccattccaacacatgcattcgaggttagtcagtgaatagtcactctccagttgctcggcattactgcattagtaatagtaataataaagcaataaagtttattatgcaattattacattacagatatttaaatgtagatttagatagatagatagatagatagatagatagatagacagatagatagacagatagatagatagatagatagatatccctcaaattacatagctgcacacagagcgc

SEQ ID NO: 246 - DNA, 1393 bp, synthetic construct
  misc_feature 1..1393: note = Description of Artificial Sequence: Synthetic polynucleotide
  source 1..1393: mol_type = other DNA
gcgctctgtgtgcagccggtatagctatatttcaactaggattctcccattatcccaccttcctagtgatttttctttttttattttgagacagggtcttactctgtcacccaggctggagcacagtggcatgtgctctctgcagccttgacctcctgagctcaggtgagcctcccacctcagcctccccagtagctggggctatagccatgcactaccatgcctgcctaacttttgtattttttgtagaaatggggtctcaccatgttgcccagcctggtctcaaactcctgggctcaagccatctgctcaccttggcctcccaaagtgctgggattacaggcatgagtcaccactcctgtcccttcctagtgattttactcttcatcatgaagtatattcttatcattttaagtgactaaataaaggtagtgtcttctttaatgatgagatggaaatgtgatctattcatatcagaaggattttaatatggattctaatatggaactaggaccttccgtatgcaggactatgtccatggaatctctcattcaccttggctggtgtccggatagaacctcctctggatggaaggcaggtcttgacacttgcccaagttgggcaacacttgcttggtccccaatgttggtgaaatcatgagccaaagaaggtcccctctgcctcttccagcaggtagcacagctacagctcaagtctcgtcaccagaccaatgttacaaagacacttttctcacagttgttaggtcagtacacagtgcttgaacatcaaatatgaaagtatacacacagtgtgacctgaactctgtaaaaaagaatccataggctaggtgtggtggctcacacctgtaattccagcactttgggagaccgaggtggggagaatcacttgaggccaggagtttgagaccagcttgggcaacatagtgagaccccatctctattttaaataaaagaaaactttgtccaccaacgggaagtcaggataaagattttctactttgggccagtcaaaccacatctggaggattgagatcaattctgggtatcacacaaagacattggtaaatttcatcctgccactaactggctgggtaatttgggtaagcaatttaagtattctgagcctcatatgcaaaaggataatagtagtaccttttgcatagcagtgttgtgagaattagtaaaatagaaatgtaaagtctttatatctatatctgatccgtaatatagtcaagaatggtagctgctagagaaacaactagaatagtgaagtctatggaagctcagatacttgagaaacacaaatacttacaccaggaggaagacgaaacttagaggtcacaagatagctttcttggctgcacacagagcgc

SEQ ID NO: 247 - DNA, 1371 bp, synthetic construct
  misc_feature 1..1371: note = Description of Artificial Sequence: Synthetic polynucleotide
  source 1..1371: mol_type = other DNA
gctgcacacagagcgccacagagattgctgtttcccctcggtcactgcattcagaactcatgtgccctatctgcctggacatgctgaagaatacgatgaccaccaaggagtgcctccacagattctgctctgactgcattgtcacagccctacggagcgggtaataggagagacatgtttgagatgagatgaaggggtacaaagttagggccctctcactggtcttggttcagcctaggcttcagttcccttgactgaccactcagggcttcccttctcctaccccaggaacaaggagtgtcctacctgccgaaagaagctggtgtccaagcgatccctacggccagaccccaactttgatgccctgatctctaagatctatcctagccgggaggaatacgaggcccatcaagaccgagtgcttatccgcctgagccgcctgcacaaccagcaggcattgagctccagcattgaggaggggctacgcatgcaggccatgcacaggtgtgagggtcaggagagaagcagaactgatgggatgggtccgtgggtcagtccttgttgcctgctagcttctaagcctcagcatcctaggagctgaccacagactgatcattagggctggaaatcatgggtgtaaattgcagtttcttagtaaacaactggccctgctcttcttaagaaaaatatagggctgggcacagtgactcacatctgtaatcccagcactttgggaggtgaggatgggaggatcacttgagcccaggagtttgagaccaccttgaataacatagggaaatctcatctctacaacaaattaaacatttagctgggcatggtggcacatgcctgtagtcctaccttcttgggaggctgaggtaataggatcacttgagcctgggaagaaagtggatgttgcagtgaaccatgatcacaccactgcacactgcactccagcctgctgggcgacagaacaaggccctgtcacaaaaaaaaaaaaaggaaaaatgtagtttaccccatgactttctagaagttagaacagtagagcgattttgagaataagccccggattcatactgctggaagttaaatcacctcctaggccagcatctctcagtctttcatgtgtatccagattacctgtagatcttcagatgcaaactgtgattcagtaggtctagagttgggcccgagagtctgcatttcacaagctcacaggggatgtgtatgctgctaccgcactttgagaggtgacagcctatgatcactaacaagttacttaacctctctaagcctcagtttccttgtctttgaaatttatttaataatactgacttcagaaagtgattgtgaggattcagtgagatc

SEQ ID NO: 248 - DNA, 1369 bp, synthetic construct
  misc_feature 1..1369: note = Description of Artificial Sequence: Synthetic polynucleotide
  source 1..1369: mol_type = other DNA
gctcactgcaacctccgcctcccaggttcaagcgattctcctgcctcagcctcccgagtagctgggattacaggcgcccacacccgactaatttttgtgtttttagtagagatgggattttgccatgttggccaggctggtcttgaactcttgacttcaagtgatctgcctgcctcggcctcccaaagtgttgggattacagttgtaagccattacgcctggccaccatggatgttctaaagacttttttttttttttacacggagtcttgctctgtcaccaggatgaagacattttttagtacttatcacattgtgttttagttttttatgtctctctttttagactgtgagctttccaagttaaggtccaagtctcgtatacatttttttgttttgttttttgagacagaatctcactctgttgcccgggctggagtgcacaatctttgctcattgcaacctctgccttccaggttcaaatgattcttgtgtctcagcctcctgagtagctgggactacaggcatgcactagcatgtctggctaattttcgtattttcagtagagacgggattttaccatgttagtcatatatatttttatccctagcacaatagctggtgtatcacaggtgctcagtaaacacagaataaaattaaatttaatacataaatggaatgagggatgaattattgttggccagacatctgagagtatctgccatggatttttctctattattttcccagaaaggaagttgtgtttattttgttgagtaattgtcatagacctgggtctgaacaactagatgagaacattacaaagaagcaacgctatttaaaattccgagctgggacttcattttattcccatcacagcagactctcagtgctaaaagcaccaaagtaagctgtacatgtctctacaggattgcaaaggaactaaacagaaaggaagggaaagggagggactttcttaattacattacaatcatcatgaccttcattattattgatgaattatcctctgttggtatgaggagagaaagaataagaagaaagtaatatgagagaatgaaagatttattggaaattgatgaaattaatcaggtttgaaaaaagcactgttgttttgttttgtttttttctttcacgagaatatcttctcccttggaagaagctctgggaagtctctgaagtgctccagagttccatcttctctctgtggagggagaaaagtggtattggaatgggccagctcagatacaagagcctgcatctgggctcttaggaggcctagaaatacaaagagataggctacagagaatggtctgtagactagccccatgcaagtgctgcacacagagcgc

SEQ ID NO: 249 - DNA, 1361 bp, synthetic construct
  misc_feature 1..1361: note = Description of Artificial Sequence: Synthetic polynucleotide
  source 1..1361: mol_type = other DNA
gctgcacacagagcgcccattcttttttttttttttttttgagacaaggtcttgctctgttgcccaggctggatggagtgcagtggcgcgatcatagctcactgtggcctcaaactccctgctcaagtgatcctccagactcccaagcagctgggactacaggtgcgcaccacgccgccaggctaatttaaaaaatttttcttttgtggagacagggtctcgctatattgcccaggctggtttcaaactcttgggctccagcaatcctgtcgcctcgcctcccaaagtgctgggattacaggcgcgagtggccgctggggttcttaacttgggtctttgaatcgccttaagaagtgtctctgaatctgggaattgcaagcaacgtttctgtgaggaccttcacacagttcatccactcttcgaagagtatggaccgaaaaaggcatagagcattcactgcacgtagagaaaatcagcaacccctgctccccaccctcagcctgaggtgcctacctccacgtggggtcaggaggcggaagcgaaaccagaagaaaaaaccctgagatctataaggcagttcaggtccctagtgacatgagctaaagagaacttggacgccaggactgtagcagacagaatccggcttcggggttcgcatcagtcgcacggaaggtggaaatagcccccaagttgtaacccgccgcggtcttccctcaacagcgcaggcgccaggactgctaggacgccgcgcacctcccgcgatgccccgccccggcgcgaggcaagacgggaaagtcaagatggacgcgtccatttgaacgtctcgcacgccttcctgccattagcactcgagcccgctgctgttgcccgttcttcctccggaataggggagggagagggaatgagaagctgctgcggcccaagagtcactgtgaaggaccccgccgctgccctcgggcctcctcggcccctgcgcctccggggagcagccggggctcgccgcgcctgacgcgtcccgagttatacaggtgcgggcgccgtaccgcagcacttggtggtctgtcgcgcgccgcgtgactctcgcacccgtcccgaggccgagcctcccctggtggccgtaggtctggaaacccggggtactgggaacccgagggagggccttgagcgtgctccggggctgagggggcctgcgggcgctcctggcctgcgggctggggtgctccttccggctcctgcttgccaacctctttcctgagctgtgcgtagcatcccatgtgcagcctcagcttctagactggcctccagcccctctgagctgtttttctgagcctcgggctctcagcctgttttcaccgtcctct

SEQ ID NO: 250 - DNA, 1352 bp, synthetic construct
  misc_feature 1..1352: note = Description of Artificial Sequence: Synthetic polynucleotide
  source 1..1352: mol_type = other DNA
ttatctttctcaaagataaaaaacagcaaaagggaaaaaaatgtcctgagctttgtagatgaggcaatctttttacagtaatttctttatctgaatttatcagatcaacaaagttgtttagaaatgtatgtccactcacatcttcccatcttaaaggtggtttttcttagaaataaataaaaatgaaatacatccaagacatccctcacctccctctaccacaagcactagcggcttcttgttttgtccattattgtgggcgagggatagtgtctgtgggtttctgggctttggaaatcttgaggtgggtctgagagctctgcagatcaaagatgagattcagcccttccaaggaactaccctctttttccaaaatgaactttctgttcttggcagtgtggggaaaatagacttctagattagaataattaaatatctgacccacaactcccccaaatgcctgtggcttcttgggctttgatgtgggcagcttactgtagaacggaaaagtacagcgtcttctcaaggctgtcagcatctgaaagcgaggaaggctaacagtgaagaactccagggtctctttcttgaaaacagacaggacctcatccagagtctctgggcagtgggaatgtgaacaggcatgaatcttgcaggtgctatgccttcgcttggccaatacgtgggctgcacagtcttgtctctgccaaccactgcagccttatcttgaatccaccatctctcactctgttcaccttccttggcctttcccaatttttccttcttgcttttctcgctcccaccacaaagcctttgcattgggccattctctctgctagaatgctttcacttcctctctcatatatttaggtcctattcattattcagctctctgctcaactgtgtattagttagggtaggatgagctaagctgcagtaacaaatagaccttgaaagctcaatgacttaacacaattagtctattttttgctactttttttttttttttgagatggagtttcactcttgttgcccaggctggagtgtaatgacatgatctcagctcaccacaacctctgcctcctgggttcaagcaattctcctgcctcagcctcccaggtagctgggattacaggcacatgccaccatgcctggctaatttttgtatttttagcggagacgggattttaccatgttggccaggctggtctcaaactcctgacctcgagtgatccacctgccttggcctcccaaagtgccgtgattacaggcgtgagccactgcgcctggcccactgttagatttttaaccctaccagatattcgacttgactttatcagctgcacacagagcgc

SEQ ID NO: 251 - DNA, 1347 bp, synthetic construct
  misc_feature 1..1347: note = Description of Artificial Sequence: Synthetic polynucleotide
  source 1..1347: mol_type = other DNA
gctgcacacagagcgcatgctgcacacagagcgcttcagcttttatccatttaattcacatatcctctgaaaagcaaatgaaaagaataagagttctcatctacattttgtaggtggaaaggagaggtacagggcaggtaagtaacttattgtggtttcacagcaggacaagctaggcttatgatagaatttggatatctcatcttgggctcaattcaacagtcctggtttggaaaacattcattattaaagctctaaaacaaaacctgctattttgcaagtgtcaagtgatttctttattcaagaaaagatggattgagagacataaaacttactctttgtttcactgtgaaaagatgctattcctagattctccagggggaaaaagctgctttaaaaaaatctggggaggatagcatgttagcaactaagaatctttagataaatatattgtcaattatgcccatttttaaggtagctacataaaaatacagttgttttgaaggctatcctgaaaatcatataaaatgaactcctttcatagttgattctctgacagttcccagaccctgcctttcctcttggctccctgaaatttgtgctaagagtatctggagagccaataaagaaatgctttctttttattttggagaccaagtctcgctgttttgcccaggctggagtgcaatggcatgatctcagctcaatgcaacctccacctcctaggttcaagcgattctcctgcctcagcctccagagtagccggggttacaggcatgatcccccacgcccggctaattttgtatttttagtagagacagggtttccccatgctggtcaggctggtctcgaactcccaacctcagctgatctgcccgcctcagcctcccgaagtgctgggattacaggagtgagccaccgcgctgggcacagcctccaccttcaacctgcacacttccactccactttttagtttagtctgccaggatttcactgttatcttttcctctctcttcacaatttcacctctaccacagtcaagcccgaactctgccggtgggaatacctcacggaacgcaatgatgacttcctgaggcctccttctcagtgcccagcccctgggacagtcctttacttcttcctccttcacaggctcagagtgtcctcatctcccaggcgaggccctgtggttttcctctttaattattgcatgtatgttgtcatgatctgaattgtgtcccctcaaaaatatgtgttgaagtcctaacccctggcccctgcggatgggacctgatttggaaatagggtctgtaatcaggttaagatgacattgtggaggatttgggt

SEQ ID NO: 252 - DNA, 1321 bp, synthetic construct
  misc_feature 1..1321: note = Description of Artificial Sequence: Synthetic polynucleotide
  source 1..1321: mol_type = other DNA
cactgcactccagcctgggtgacagagggggactgtgtctcaaaaaaaaaaaaaaggaaagtagtagaaggcatagacatggagtagttgggaaggagattcaaaaggtagacaggatctgtgcggtataattgggagccatttactgtacagtgcctggacttagcaagatagttaaatatatataattgggctttgcaacctgagtaattccttctagccacattgttttccaggacttccagcttcttcctttccaatgtcaactttgcctacatatggagtgcttttgtagaactcctgcttgcaatgaggtgccacttaaatctgaactctccttcagctccttttcccatttaaacttctctctcctgtgtccatttcttgtaattctgagtagtaatattttatggatagtagtcgttcaatacattctcttaacaagttaacaaagccattgttgttatactcctttgtggtaaagagagacattaaatatgggaatttcagtgttcatgacaaaccagtgggagagtaactgaagagataatatgtctttgagttccagagaattggtaaaaaaatagtttaggatcattgacaattaaatggtggtagtaatactgctggaaacatggtttgataaacacaatacaacagttttagaaatgaattgaatggttggctgatacaaatattatgaagttggaggtatttctttaatttcttaatgagtcttttagagctagccagcattagtagcaatacctggtgataagcctattgcttgagggactgtgcccagaatcttccaggttaacacttttccccagcagctaccacagacacccatggtcttttcttcccttagaacttgttactgtcctaaacattctgttacattgctagctgctatcaatgaggttcatcagaagactctaaaagaacatctttggcattgatgagctaaacaaaactaaaatggtgaaatacttcccctttggtatgaactgatttgtatccttccaaaattcatatcttgaagctcgacccaccaatatgattgtggttggagatcaagttttgggaaagaaattaaggttagaagaggtcataaggaggccatcatggtgggattagtggctttgtaagaacagagagagaagttgctctctcttcctcatgtgaggacacagcagggtggccatttgcaagtcaggaagagccctcaccaggaattaagtcagctggcaccttaatcttgaatttgccagcctccagaactgtgagaaataaatttctgtagctgcacacagagcgc

SEQ ID NO: 253 - DNA, 1318 bp, synthetic construct
  misc_feature 1..1318: note = Description of Artificial Sequence: Synthetic polynucleotide
  source 1..1318: mol_type = other DNA
gctgcacacagagcgcccatatgtgcaacagtgcctgcatgtaatagtcctaagtgtgtggacttgtcactgacaagtgttcggccagcattgtgcaccttgtgtggcgcgtctggtgccgtgtttttatgtcactgtaaataatactacccagtacgttatcttgggagggcttctcatcctgagcatttaattgtacggtatagtgctggattaggacagagataatcttggcttctccctcttctcacctctaaatatggcccttaaaaaaagcaagcattttaaaaggcatatattttctcatttattgtatggatatatggtaacatttccttctttccatactctgaagtagaacaaaggcaacatgctcagaactttaaaaaaaaaaagatgtgttaatggcattcagagatgcagttatttgccctaagaataggtagagctctgaaaaatgtcttgtggtttgaattttactgaaaaattggaaggatagcatcactactgtgaacttttctatttggtattattttgacttcaaaagctctgaattttgagattaagtatacaaattcttaaaggataaaaatttaaaggagatctccatgtatcatcaagagcttatacatcacttagatatggccaagattataatattttggaaggtgtattctcaaacatgagtgtttgtggagggatatggggaaatattggatattttcccataatcagcaaactttttctgtaaaaggtcaggtagtaaatatttccatctctttagatcatacatagggtctctcacattcaactctgtgattgtagtgctaaaatagccatagacaatatgtaaattgtagataaggctgttccagtaaaactttatttaaaaaaaaaaaaaaaaaaaacaagtggagggcaggaattggcccatatgggctgtggtttggtgacacctgctctagatcatttctatattcttactgtaattttagttccagcttcttttatgtaatggaaaattctgggtttctatactcacagaccccttgtttggggaagcaaagttctcagtaatgatattcctgatccatgtctggctttaatcagtaattgagcaggacgtacaagagtgagactcactacagatgtgcactgtgcagatgtctgctgataagttctgtgtagcaaaaatgcagaacactggaatgtggctggggctttctgtaaggaagcatcacacttcattgtttatattagcttttcatatagtatcttttatttaaaattttttgtgggggaggggcatatacagata

SEQ ID NO: 254 - DNA, 1317 bp, synthetic construct
  misc_feature 1..1317: note = Description of Artificial Sequence: Synthetic polynucleotide
  source 1..1317: mol_type = other DNA
gttgattttttgatctacgaaacttaatccccactgtggcagtattgagaggtgggacctttaagaggtgattagtgcatgaaggttctgccctcatgaatgggttaatctattcatgggttaatagatgaatgggttatcatggcagtggaactggtggctttataaaaagaggaagtgagacctgaactagcgtgtttgacccccacaccatgtgatgccctgtaccacctcgggacttggagagtccccatcagcaggaaggctcttgccagatggggccctatgaccttggacttctcagcctccagcactgtaagcaattaatttccttttaaataaattaaccagtttcatatattctgttataaataacaaaagatggactaagacagtatgtatacatatttgtgtggccacactgaatgacatgctataagagtaaagaagacgtaaagaattataggtgctcttcctgcttaggatctgccttatgggtcttaggaatgggaggccatctggtttaattgttgtttgaaaatttaggaaagaggatgaagctcatgaatgcagttcctactgatacaggaattaagaagaaattatttaggcagatactgagggtaaggaagtcctctgaagattttccttttaatgaaaggcagcccaaaatcattttcttttctaacaaagagcagcctgtaaatcgagatgtaaacatagacgagcaacctagaagtttgcgtgggtgaatgctgacagttgtgccactaagaaaaggctatctgggactagggcgctctgtgtgcagctattattacataaaaccacaagcctcctgggctccagatccagaagcaggcaaaactggccacagggctgccacagtacactactataggggcagcattcatattgctgggttttttaaaaaaatatttttatttttctctttagaaaaaaaaggacagacacattgttatctatgtgaatggcctctcctggagcacagctccattggagggagggaaccagtttcattcataaagcagcctagaaaacagtgtgacaaagttgagaatgctgctgatccggactgtgttggtatggagctgcatgtatgctggagtgaacatttgtcatttgtggctgcttaatattttgaccactgccatggtttgaatgatgcctccaaaactcatattgaaatgtaattgccattgtgatggtattaagaggtgattagtcatgcaggctgtgctgtcaggaatggagcaatggtattgccatgggagtgggttgctgcacacagagcgc

SEQ ID NO: 255 - DNA, 1292 bp, synthetic construct
  misc_feature 1..1292: note = Description of Artificial Sequence: Synthetic polynucleotide
  source 1..1292: mol_type = other DNA
cagaggaaagatgccacctcacatctggagcaaatgattcccaccagatcctggtagcttcaccaagagtaagtacaccagtcaacctgtgagtagaacacatattttgcaaagccatgttgggtggagaatgtcacaaaaaatagcgtttccagagccagagatactttcaggggtggagaaagacaagcacagagggttcccctaatggccagaggaccgccaggcccagataggaaaggtctttctcacataaggagcagcacccggggtgccaaggtcattcagagctgaggacttgcagccctaagcacaaaggcctacaggtggaggaactgagttgttcatcaggcttgacagctgcagcagtttgagactttcttgggttggaatttccagtggagaggaaaggaactaaaagataatatccttggaatctttggagtgtcacaggaattcccggtggtgagagtggatttcatatgagaatgtagaggagtgggcccgaaagtccctctgtctggtttgtttttgatttttttattattattattatagagacagggtttcactatgttgcctaggttggtctcgaactcctggcctcaaacaattcttctatctcggcctctcaaagtgctgagattacaggtataagtgactgcaatcagccaaaatgtaaaattaatgatgacttagtgtgtattcacgtgcttacagttaaaaactggtcattttttcaaatgtttatcatattcatattcataagcaatatgacatgtcttcaaataattcagaataccactgttgctattcaaaagaagaaatctccctctattaaactagggacttcaagtcttggtctttactcattctctcttccttcacttccttctttcctatctttgggttcctttaatgaaatgttctccatcccaggcaggaaaaccatttccctgaaaaatataaaatccactgctgagcgctgcagcgagaattaaccttgattaccacagtaatttactaatcaaaactggagacctggtaatcaagctggaattgccagctgcttgatttttatagtaacataaccaagatcgaacatttggtaaacaaggggtgtgggtgtgatggggagactgggacaaggtaagggaggggcagggctgtcccagggctggaaggaggctgacatgtgctctgttgactgggcagcaggaacagcagacaccgaaagaaatgcagaaacagacagaactgcagaaacttcctctgagctgcacacagagcgc

SEQ ID NO: 256 - DNA, 1289 bp, synthetic construct
  misc_feature 1..1289: note = Description of Artificial Sequence: Synthetic polynucleotide
  source 1..1289: mol_type = other DNA
aggtgatccacccacctcggcctcccaaagtgctgggattacaggcatgagccactacgtccagcctaattctttaattcttaatgagtaagtgaaattgccttaatgacttgtagccaggaaacactcaggctggtgtttctcttcttgttccaagagttatggataactaccagctgcttctgatgacactgttagacaatgatcatgtgaccacaggggtggctctgatggaacccagatgataatcccatatgttaggatcaattccttgctagattcatatgttgctttttgtcaaaaagtcattctttagaagctgcagtacttcctgttgtgttaagggcctctctacccagtgaggagaccagacctggcctgatgagctgcgtgagccctgcccctctgtctttatttgggaaatggggatagtgacgcctatgggacctccctcatggggttgttgtgagtctctgtaaggtcatccttgaggaagagctttgcaaagcatcaagaaccaatcaggtaatcccttacatcaggaatctggccggacgcaccctgtaggccacagaaaatcaaggactcagatgcctggccacgcctccttaggcagcagtcctgatgtggtgtttctcagcagctctgccttctcacagccctcctggtgtgagcagagttagtgccagcgttaatagtgtttattttagaatcaacacatccctatacctcatcatgccacaaagagaggcatttaggctggaccattccacaaatatttatagaacacctcctaggagccaggcattgttctactctctgccaacaccaggagaacaaatagatactgtccctgctcgtatggagcccacagtgagggagagaaagacatgaaaagcaacagcacccgtgaacaacccccacactaataaatatgtgactaagagctgtgacaaatgccgcgaggggaaaacggggactgtgaagagagattatgtggcaggagggctggaaacagatggcacttctctgaggaagtggcttttgggctgagacctaatggcaaatgggagttagagactttggcaaaaataacagccacatgaaggaagacccaaaggccagcattgtccagttttatgatcaaggggacggtggtggcagctgatgaagccagaagggacagcagacatcaggcaatgcaaggtagttctgtggtggtgtgggtttcacctgacgtgcagtggagtccacagagtgttaattagcagtcgctgcacacagagcgc

SEQ ID NO: 257 - DNA, 1284 bp, synthetic construct
  misc_feature 1..1284: note = Description of Artificial Sequence: Synthetic polynucleotide
  source 1..1284: mol_type = other DNA
gctgcacacagagcgcaaagaaagaaagaaaaaaaagaaaaaattacaccaacggaagtacatagacagcattaaaaaaaaaaaaaaaaaaagaacaaaggtgaaggtcctggatcccacagctcaccaggagcatgtccagcatggcccatggttgaaggcccgtctcccactccctcatatctggacaaaggccatggccaggggcaaggaggcccatgcctgaaggaggcctccaagctggttccagctcctcacgccaccccaatgctgtgcaacgagccatcagaggctctgcccacacaaatggcatggccatgccacagccacagagagtggaaggtgactgcccttaccatctcctgggcaccacaagggatgtgtgaggactgacgcacaaggaactcaggggcttcccactcacggtgctcagaagacagaccggctgggcggctccccagtcgctcaccatgagacacacccttttccaaacactttcccttccatgaactttatattttgaaagactgcccttccatctaggtccacagtcctgatccccagaacaaagctgttcaatcaatacttcctttccccacttcatctgggtcagaggctgtgtcacacaaaaggccaggccacagggctcccgcaaggcagctcacgggcatggccacctcacagggcctgcgctacgaaggcctggggaaggtccaggttcatccatctccctggtccaggctgagtccccgggtcccagccagcacccatgcaaagtaggaacgtgactggttctagtgcctgagctctcaattcctgagctactttcaacaacatggcagctaagaaagtttacaccaaaaagagaaagctagtctttttgttttaatctttttacccagcgtaggtaccaggagggatctctgaaaggcaggttactcctcgccaggagtaggatcaaatcatgagcttattttaaattggcccattctaggtacagtcttggccaagtctggatttgtaatttagcagaaaagaaacttaaatgtcagtgcccagtgctggcactggtgatgtgaaataggcaattccagacatttcagactggagattgaattgatgactgtgtgctgaaggcaatctggccagacttatcaaacaactccaaaatatctgggcttattactactattactagtatctccacccccaaatatctttgagacttactaattttacatatgggaatctatgcttaaataatgactttgagatatgacatca

SEQ ID NO: 258 - DNA, 1247 bp, synthetic construct
  misc_feature 1..1247: note = Description of Artificial Sequence: Synthetic polynucleotide
  source 1..1247: mol_type = other DNA
gctgcacacagagcgcttagtagatcatgaggtctgcccacctcggcctcccaaagtgctgggattacaggcagctctaaccatctaagaaatcaaatatacaaaagataaactaggtttacatggtattgaaggcatgtacaggcagtcaacataatagttgctgtgagaagataatacaaatcaaaggctaaagttgctcttccaatttgaagaccaaaaaactaacctctcacctgaatggattccctgacccccaagtcatcaaccaaaaatgttcaggaaaatcatggaggaacgtgccttctggaaacaggcttcatttctgccaaaaatgatcatggtctacccttacctaccaatgtatcctagacagacactcaaaggtcctatcatcaggctaaaaggctagaaacatcaacaaaaaatattaacagcaaacatgtgtatgatatgccagcactggtataagcattctgcctatggtaattacactaacttatttaagacgcacaataactctcctgagggagatactgctaccatccccattttactgataaagcaactgaatcacagggagatcgcagcttgctcaagaccacacagccagggagtggcaaagctgggattcaaacccaagcagtctggctccagagcagggctgtttgccgtattgcctctcttagagcactaataacaaacctctgctgcctgcatccgagcaaatcacccagctcaggtggagactgcaggcaggcaccttcttggatgaagaactaatccctcctgggttaatgaggacagagaaggggcagagtcacaggaagcatgcatgcgcaggcctgtggaccctgggggatggccatctcaggggcaaacgggttgcactgtagagcccacaacgagttcaggtcaacccctcggtctgggagcacccagaaccaggaggtgagagaacagctccctctcactggccagctcccagaggattcaaacggactatcctcctgaagtgtcatagcccgtggccatagtcagcaggtactgattccacaggtgctatcagagctgtcccagggctcccgtcccaatccctctcaaggtaagagttccctgaagatctgaaccatccctttctgacccataagggcatctttccctggctttatgggacagagccctcccacatgcttaccttagtggaagacaggcagagctttccagattatgcccgttttatagac

SEQ ID NO: 259 - DNA, 1178 bp, synthetic construct
  misc_feature 1..1178: note = Description of Artificial Sequence: Synthetic polynucleotide
  source 1..1178: mol_type = other DNA
gctgcacacagagcgcatgaggcaggagaatcacttgagcctgggaggcggaggatgcagtgagccgagatcgcaccactgcactccagcctaagtgactgacagagacagacattgtctcaaaaaaaaaaaaaaaaagataaatggttcttaaacatgagaatggcaggggaagttggaaagttttgttgtagtgagtacagatttgatttggttactccacgagagtcattttagcaccaagtatattaaatgatgacatgaagaagagcttcatatgctgaagagacaactgacaacccgaacttccacaggttctcaccttctgtggcttattatagctcattttcctttcagatcttacaatctcccactttaggaactgaaattcttcggaatttcctgtgattatgttttctagtgttacgggaaggaaagttatctttagggttagacaacatgtaaagttgaatactgaattcaacagagatcttaaaatacaagtccaggaatgaaagggattaagaatgtacactgtgtatagttaatgtagactataactaggttcataaaacaattgtaaaaattgtctttgaagagaaagtttattaacttcattttaatattcacaatacagatttgagacattttatgggagaaaaaccacaaagttctaatcctccttaagaactaggatgtgtctcttcattgctcacaggctgcgaattaagctttcaattcattcaacagtgagtacctactatgtgccaaaaaatgttgccagcagtgggaatgttccagagaatgcccttgttcccatggggtttacaacctagtgagtgagacagttaatgtacaataaagaaataagtacaagatctttatacaagattataagattaggcagtgccgaatgttaaaagcaaaataaaacagggctgatgtaagagttaatgataattcttaactacctcccacacaaatgagcttctaaggactttactattgaatttgtcatgtctttttgccttgtgttgaaagttacatatatagcatcaccgtatacagcgtattgttactgtattcctacactttcctatttatatgtttaagttgtttatgtgttttgaaaatttagcataacacaaatttgagttattatttgtgcatgtgaattt

SEQ ID NO: 260 - DNA, 1177 bp, synthetic construct
  misc_feature 1..1177: note = Description of Artificial Sequence: Synthetic polynucleotide
  source 1..1177: mol_type = other DNA
ggaattacaggcgtgtgccaacacattccgataatttttatatttttagtagagatggggtttcaccatatcggccaggctgatctcgaactcctggactcaagtgatccacccacctcagcctcccaaagtgctaggattacaggggtgagccactgtgcccagcccagattttttttttttctaagagacagggtctcactgtgtcatccaggctggagtgcaatggtgcagtcagagctcatttcagcctaggaagattttaaattgcacaacagctagaattagagcttttgaatctcttagatctgaatacaagctaacaaagcacacatcttatattaaatgtcattcttaacatagataacaatccgtggataagtcaaaaatagaatcatgctggcttacctgaaataaagaaaaatgtaaatcataacacagaatccacgtatgtgttgaatataacagtctccaatgcaattcttcagaatttttactggagtagaaagtaaaatctcacatgtgctctatcctcattaaagaagaaaaaaacaagaaaggatgaccacagcatcctccctcctttgccttagctttctgttctgacagtcattcgatggtacccaatgtctgttagaaaacagcatgctaaattagaaaaataaataaataaaggcagcatcttacatgacagctccatctcctggtcaaaagtggaaccatcttaattcacgttcctttggctatgtagcagtcagcacataaaattaaatgatgtacagcccataattccactctatttgaaatcaactactttaattaactgtaatttaaacatttaagaagaattatagtatgaatttttagaattataattctattttggggattcaaatttctttacattatgtttaaactaaatggaagcttttcccatcattgaaaacttaagatttatttaactttatataccatctgaaaaagtaatatgtatctcctataaaacaattttagatgtcaagcttattgataatgaacatcacatctctttgtggagaagtataagtttttgtcactagagaagttaacacataacacttgtgttgctattgtttggaggaatgttgaaaggttaaagataaggcaggaaaattaaatgaggctgcacacagagcgc

SEQ ID NO: 261 - DNA, 1156 bp, synthetic construct
  misc_feature 1..1156: note = Description of Artificial Sequence: Synthetic polynucleotide
  source 1..1156: mol_type = other DNA
gctgcacacagagcgcacacagagcgctaggaaaacaggtaaagggagtgctattatgttcaaactgctttccagagacaatattctataattccattgacaaggtgtatttttagagcatgatataggacttacttcatgagatgaaagaattataaggtatgggggctaaggaataatttcaattcagaaaatagaacagaaagaaaatattgtgaattttgcccttattgactttatgaagaaggaaagacattccttaaatcattagtcttcaaccaccctaattttcttattattgaaatagtctcctggaatatagaggctttaatgttttttcatgtaaaaaatgtagcactttagttgtaatgctagaatttcttgtaattattgaatgctaatttttccttgattacttatgtatactcaatatcagtgtcacattatggtatttctgcaatatgaaacattaatattaagcatatataactgataaccaaaattaactagttttcaaagaattataatgtattgatggtaaggagagtggtagaaatgagatgagtggtttgtttcagaaagcacaatcacatttactttgtgtttgatgctgaaaaacaatgcttgggagaagtcaaacgttatttctttctgatgcaagaagcttaattatgattaattactgtactggttttctagagctgccataacaaagtactacaaactaggtggctaaaagcaacagaaatttattgtctcacagttctggaggttagacgtccaaaatcaaggtgccagcagggccatgctctctctcatggttttaggagagaaatctgccttgacgtctagcttctggtgttttgtggcaatctttggtgatcctcagcttgtagatgcatcactgcaatcacatggcctgccttctccctgtgtgtcttcacagcttcttccctgtgtgcatgtctgtctgtggtctaaattgtccctttttgtgaggatgccagtcatattagcttagggctgtattaggccattcttacattgctataacgaaataccggagactgcatgtattagtttgttttcatgctgctgataaagacatacccaagactgggcaatttacaaaagaaagaggtttaattggacttac

SEQ ID NO: 262 - DNA, 1130 bp, synthetic construct
  misc_feature 1..1130: note = Description of Artificial Sequence: Synthetic polynucleotide
  source 1..1130: mol_type = other DNA
tgtattttcagtagagacggggttctaccatgttgcccaggctggtctcgaactcctggactaaagcaatccacccacctcagcctcccaaagtgctgggattacaggagtgagccaccgcacccggccatcaataattttttaaatgccatgggtcattccaatgtggagccaggggtgagaaactgttcttgaggaattaagagtcgcaatagtcaaatatgccccatgttcctctcagaaactatttcagatcaagccagtttacttggtttctagaggattcatagtaatatcatattccaaaagatcgttccagaacaaacggatgaattcttgataacctgttgttttgatcctcagtgaaccttgtgtctcaggtctactggacccaactctcacagtgggatgagagtggggtggagtttgagggatgtttttacatctctaatgacaaaagtaggattttctgctcaggaattcctacacctgtccattctgaactctgaatgagaaacaaaccaacaaataccaggtctgcatgtggattcaaaatgagtgataggtgcacctttgatttagtaaacattcagcccccaggcaaatcttttttctatcttcatattccattacaggatagatttatgtttattgtgacaacccaaagatatgacagactctcaggtattctctggaacagtaggttttgtacaattatgatgcgacatccataatattattcaacttacttgatgacatgtcacacaaactttaacactttataatggcacttgattagtaacttttctttctccccataacagatcatgccatataacagagagtttactacacacatagctcacataacatcagagtagttgtccttgaattgttcatatgttgggttttttttggttgtattcatgcttcttgcagtagttttatctgagctatttttattttctcaatatgtaggggaattttccatactcataagcttgttgctggatggcttgcagggattgatggcttatagttgactccactttgactcagctggtagaaactctgctatatggtgagaaattgggtgtcagggcgattgtaataagctgcacacagagcgc

SEQ ID NO: 263 - DNA, 1110 bp, synthetic construct
  misc_feature 1..1110: note = Description of Artificial Sequence: Synthetic polynucleotide
  source 1..1110: mol_type = other DNA
tgtgttgcccaggctggtctcaaactcctgggctcaagcagtcctcccgccttggcctcccaaagtgctgggattacaggcatgagccaccacgcctggcttaggtttactcttcactgcttgggatcaggtgatttagtttcatgattcctgtagccatctttcaaagggcatgtgagaatagccgggccactagggatagtaggtagtctgtttctctttctctactggggaaggaatttggaatactgagatttgttcatatctgagcatgttagcttcagattttccttgttgccaaattaatggcagttttgaaagctgagtgagctaccttaataagtcctgtgtgtcctgctgctggaagtggaggccctgttcttattgcagcatggtaatttgttgacagtgctgtggtgacagtgctttctggagggagttgaatagaaggttgagtccaatgcttacagtgagctcttagctctcagtagcagacatctgccacttgctgagctgcaccctgggctaggtgctgtcccagagacctcatctgcattctctcctccagctctcctggcaactctgtgagagaattcatgtcctgattcccatttgatagaaatgggaacacacagatgtatgaggtaacttggatggccatgtagctttgaaatgagaattaaagccacaatttcaactgaggtttccctgagttgggagcattcactcttacccctgtgctgtacttctttgcattttcacagaaacctctctttagatttctgcagggtggcaggttgcatgaggaagctctggaggtctcagttgattgtgagctcccatgggcctcctgtaaaagggcagccaaacaagcatggcctcgggctgatttaggggaagtgcaggatgcagaggccaggaggaagtcctctagacactgtttctttgcccaactttgccctggacacctgctctgtgccaggccaggtgctgacaccaccactgggagcagctggagacggcccccctgtctctgtgacgcatctcctggttaggacctattctggaccccacatctcacctgcaacacatcagctgcacacagagcgc

SEQ ID NO: 264 - DNA, 1083 bp, synthetic construct
  misc_feature 1..1083: note = Description of Artificial Sequence: Synthetic polynucleotide
  source 1..1083: mol_type = other DNA
taatcaccagaaaatcaattttggaaaagattattgtgtgtgtgtgtgtgtgtgtgtgtgtgtgtgagagagagagagagagagagagagagaagatcttgctctgttgcccaggctggagtgcagtggcacagtatagctcacagcagcctcgaactcccaggctcaagagatcctcttgaagttcagccacatggtcagcccttttgagtaaagctgacctctccagaacatgtgttgttggaggaattagggggaagctgtgggtatggggctggggtccaggagagcaatgcctctgaaccaataatgttgttgccaaatgttgcaatgcaggagccacttctttcaagtggttttaaaaatcaccagtatctagtaatatttaaatgtaattttaagcaaaataattattagaaaaattcatatgttctatgatttcaaggcattgaagaaataaaatgtatagagagaatttgtaagaaaccatgtcaaaatttaatattattcatgacctgagtggtgagatgagtgacttttatgtcattttatacaatatagaacatttcaaattactatgtatgtatgataccttgaaaatcaatcagaagccataaaaggtttaaaaaataggacaagttaaaaatctaaaatatatacattaatgtcttgcttttcttaccgttttctgattcacactgacaactttaaaccctatttataagctgatgaatctcaactgggatacagtctttgaactccagacctatatatacaaccaccaatctagcatcttaatttagatagttaataggcatctgacatgctacaaatgcaaaactgagcttctgacttttgctaaataaagttcataaagtcttgcccttctttgctaatggttgctgtagccaaaatattggaatgacttttatttttacactttactcatatttcttatgcagtccatcagcaaatatttatggctctgctttcaaaatacaatttgaatatttaaactccacatcactctcactgctatcatgagttattgtctagcctcccaatgagctgcacacagagcgc

SEQ ID NO: 265 - DNA, 1063 bp, synthetic construct
  misc_feature 1..1063: note = Description of Artificial Sequence: Synthetic polynucleotide
  source 1..1063: mol_type = other DNA
gctgcacacagagcgcccaaatatttgtagcactaagaaactggtcttgaagaataggaaatggtgctaatagagtagcagaattaggtaaagcccacttacctggtgatgctctcactttagggagaaccagaaagtgccaatgattacttaatatgtagccgtatggcaaagttttaagtaattttgattccttttctggatcagtaatttatatctggttgtcccaatttagatgtgagaatctggactgaaatgcatgtagtaaatattaactgatcatatataattaagcagataataccagtccacttattagcacctcagaaaaaaataaaccactatacaaatttgaactgtcattattttaagaaaaacttgagtaaacatgcaaaaacaagaaagctggtagcaatcaacatggctaggacctgcacagtaattttacttttttgccttcagttcataaccttgttaggtctttgctttgtggaggatgctatttctcatgcattaactcttaagtgcttacacataactaaagttttattaaaagaataatgaaatagtatacttacatcaattttccttctacacatatagcagtattattattgatgcttttaatcatccattcctgtagctgaactacctaatcaagtataaaacaaagaacatatttcctgtattacttgcagcacaagcattacaaaattaacttacattaaaagaaaaaacttgtctaagtaatccaaatattccttagtgtcatcgatgtaagattcacattctattctaaatagcaataggtaaaattcttgtatacaatgaaacagaaaagaaaagactgaattcaggttgtattgcatttgttctacaatcaagaagcaattatacttcaaatactctatcaccaaatctcaactggtggggacaaaaatcatgtaaaatcccaaggtacagattaaaacaccaagtcctgcaaaaagcccagtaacttggagtgaaaaggagttagctatgttttgtccttaaaaaattaagagttttttttttttttttt

SEQ ID NO: 266 - DNA, 1031 bp, synthetic construct
  misc_feature 1..1031: note = Description of Artificial Sequence: Synthetic polynucleotide
  source 1..1031: mol_type = other DNA
aaaaatccaaaaattagctcgtatggtggtgcgtgcctgtagtctcagctactcagggggctgaagtgggaggatcactggagccccagaggttgaggctgcagtgagctgagattgcaccagcacactccagcatgagtgaccctctatcaaaaaaaaagaaaaaaggaaaaaaaaagtcacaagagagtaatataataaggaggaggggaaagatcctatgtccatagagaaaagaatggaaaagcgatcagtaagccagaccgaaagatgggtgggttttggatagtctggaatccctggatgatgaggtgtctttgaggaatgcacatttacagtttggctgcagaatggggtataagaagattaattgtggctggaaaagaacatcggtgaatacggagaatggtgatggcccggcagaagagttgctggtgtggcatggcctatagaggcactgtggtagagtggaaagagatagtattctggctctgcttattagctgggtgaccttggtcatgaagttctgtggctctttgctttatatatctatacagtagagataggatgcttcgcagaattaagattatgatgaagagagaaagcctaggtgatacaggcacacatgtatttcactctcaatacaaaaagaacaacaaaaacgttgttttgttttgtagaacagagcttttgagcaaaagaatgatgtcactattgctttgaaacagttgtttctgatagattggggggtagtgaaggccctagggtaattgccccataacaagagtggctgtaagagtccaggtaattcagtcaaagtctgaactagaccagtgcctgtaggatttgaaataaggagctgaatgggggaagcattgcaaacacgaagtcaacatgttcagaatgttctgagcaagggaagtggtattgctagggataacagtggtttcataaatggaaataggtttggcattgctgctgcttttgattatggagtaacataaaattgaggttggctgcacacagagcgc

SEQ ID NO: 267 - DNA, 1012 bp, synthetic construct
  misc_feature 1..1012: note = Description of Artificial Sequence: Synthetic polynucleotide
  source 1..1012: mol_type = other DNA
acatttgggtgacttgctttagtgctctattaaatttattgtggtggtatgaaacctgtaatgtctctgagatatgcctccatattaattttaaaatagacacgaagtaatcctcaacatttagaacatttattttggactgatgcttggttattaagctaaaataagtcaagtaattcactttattaaattataaaaattattaaatctactatttgtttaagtttccattacaaatttgtgtgcttcatgtttgaagttgtatgataatctatttatatgatatagcagagaggaaaataaaggcataatgtttatttttaattgaatttgttcttagtcatttgtatcaataaagtaagaagatttccaacaacttaatgtgtttctattagtcataaaaagtatcactatactaatgtatagtcatcagtcctcaattattttctggacataggctcagctcttcatgtgaaggtcattattatattcctatatgatggttgaaatgatcagtgacttctgcgtaatagatgtcatgtttttatgcaccttcattcatctgcctaattttatatctcctcctctaatatattttcatttgcttgtttttcttatttttcagtgtactttaaattatatggccttataaagagtcccttataaaaccatcagatctcattagaactcactcactatcacaagaacaacatgaggaaaactgcccctatgatccaattacctttacctgtcctttccttgacacttagggattacgaggattttaattcaagatgaggtttgggtggggacacaaaacctaccatatcagtagacattatgttagtttctttgaatactatgaataagctgtaaatagataataaaagtttctcaatgtgctttccaacagtcagtaaacaagagaattttgtaaatagtatacaattttatatcactgcattcttgaggaatctgatactgaataaacctttagctgcacacagagcgc

SEQ ID NO: 268 - DNA, 949 bp, synthetic construct
  misc_feature 1..949: note = Description of Artificial Sequence: Synthetic polynucleotide
  source 1..949: mol_type = other DNA
tgggagactgaggcagaaggatcacttgagcccaggagtttgagaccagactgggcaatatggcaaaactctgtctctaccagaaatacaaaaattaacggggcatgatggtacatccctgtagtctcagctgctcagaaggctgatgtgggaggactgcttgagccctgaaaatggaagttgcagtgagctgagatctcaccactgtactccaggcaacacaacaagaccttgtctcaaacaaaaataataataattctgacaggatctgattgaaagaggaatcacagtggttctaacacttgtgatccatccagacatgtttatgtgctttgttaaaacaacatcctgaaagaagtgttgtaatggacttccatgcttaggaaaagaagtgctataatttgcttccatactcaggtgggttttgttctgcctggagagtcatcctacatgagctatttctttaaatcaagatgctaaacagtaaaaggacctgttaataataatttaatccatttatatcaagtttactaaacaattaccttgaaaaacacatatataaacatacccatatgtgtatatatacatactccaaaatagtataatggtgcaggttcagatatatactttgtattcactagcgaattcgagaaaacagaattggtatgggttggctgtgtccacatccaaatctcatcttgaattgtatctcccagaattcccacatgttgtggatgggacctagtgggaggtgattgaatcattgttgccggtttttctcatgctattctcatgatagtgaataagtctcacaagatctaatgggtttatcaggggtttccacttttgcttcttcctctttctctgttgctgctgccatgtaagaagtgtcttttcgccctctgccatgattatgagacctccccagccattgctgcacacagagcgc

SEQ ID NO: 269 - DNA, 892 bp, synthetic construct
  misc_feature 1..892: note = Description of Artificial Sequence: Synthetic polynucleotide
  source 1..892: mol_type = other DNA
gctgcacacagagcgcctcttggactcattggaagacctactgttttaatttttgctgctgataaaactgcatcacagagaggttacctaatttgcccaaggtcacaggacaggactagtaagtggtcttggttcattattgtcaaatttactaatcaccttgagaaaaattaagattggatggttgccttattttacaacttagaagatgattgaagacattttggtgcaggtggggagccagattgcaagtagctcagtgagttgtgtgggtgagttaagcaaccttttttattctttttttttgagacggagttttgctgttggtgcccaggctagagtgcagtcacagcttactgaaacctccacctcctcatttcaagcgattcacctgaactcctgaccttaggtgatctgcccgcatcagcctccccaaggtgctgggattacaggcgtgagccaccatgcccagctgagttaagcaatctttatgtagagctctcctttgagaaagaagttggttggttcaaagaaagataaatgggacagtggcttggaagaggtaatggaggctaggaaggtgtttatcaacaaaggaagatgtaggctgggcgcagtggctcacacctataatccccacactttgggaggctgagatgggaggattacttgagcctaggagtttaagaccagtctgggcaacatagggtgacccctgtctccacaaaaaattaaaaaaattagccaggcgtggtggcatgtgcctgtggtcccagctacgaggggctgaggtgggaggattgcttgagcctgggaggtcgaggctgcaatgagccataattgtgccactgcactccagcttgggtgacagagtgagaccctgtctcaaaaa

SEQ ID NO: 270 - DNA, 878 bp, synthetic construct
  misc_feature 1..878: note = Description of Artificial Sequence: Synthetic polynucleotide
  source 1..878: mol_type = other DNA
cctgacctcatgatccgcctgccttggcctcccaaagtgctaggactacaggcgtgagctactacacccggctgggccttcatggttattaaatgtaaatacaacggggccaagctcagtggctcatacctgtaatcccagcactttgggaggccaaggcaagcagatcatttgagtccaggagttcaagaccagcctgagcaacatagtgaaaccccgtctcgaccagaaaatacaaaaattagccaggtagtccctgctacagggctgaggtgggaggattgcttgagcctgggaggtcgcggctgcagtgggccaagatggcaccattgcactccagcctgggtgacagagcaacaccctgtataccgtatacaactgcttagatatgtacatgattagtgacaagagggatcctcccttggtaatagaaaatttgggctaggcatgctgcatcccaaactgatgaaccgaaactgctacaaatggtctctaccaacacattcccacggctaagtacgaagaacaagggcgaatggtcagaattaagctcaaacctagctgaagcactcaacattgattcattccttggaccaattacttgctaaatctctatgaactggtatcttatttgtacaatgaggttgctattttaaaaattaatgttaccagctgggcccagtggctcaggcctgtaaacccagcactttgggagcccaaggcaggtggatcgcttcaggtcagttccagaccagcttagccaacatggtgaaaccccgtctctactaaaatacaaaaaaaatttagctgggtatggtggcaggtgcctgtaatcccagctactcaggaggctggggcagtagctgcacacagagcgc

SEQ ID NO: 271 - DNA, 865 bp, synthetic construct
  misc_feature 1..865: note = Description of Artificial Sequence: Synthetic polynucleotide
  source 1..865: mol_type = other DNA
gttggccaggctggtcttgaactcctgacctcaggtgatctgcctgcctcggcctcccaaagtgctgggattacaggcatgagccaccgtgcctggcctgtcaatttacagttttcacaggtagtgtatgagagttccgcttgatctacatcttcaccaccagttgctgttttcagtcactgattgattgatttatgcattttattgtagtttaaatttgcaattccctgatgacaaattacgttttgtacttttttaaaactgttaatgttcacttacgtgtccttgttttaaagtccctaacaggtcttttgtccacttttaatcatgtgactaggtttttcttatagactccaggaattatatattctgcatatgaatcctttatgaaataagtgaattgcaattattttctcttactcagtggttcccattttcattcccttaatgctgtcttttaatgaatacttttgttttaatgtaaaccaacttatcaatcttttcctttgtggttagtgggggatgtgtggtgtgtttgtgtatgtgtgtgtgtttgtgtgtgtgtgtgtgtgtgtgtgtttcttctgaatacttctaagattttctctgttttctgctttagcggttttcctaaagtgtgcctagatcttttactttgaatttattctgcttgggtttcataagacttcttgaatatgtgcctcaatgccttttaattatttttgaaaatgattggtcagtactacataaaatcttgcttctgctgattctgctcttctcttttggaatatatatatatatatatatatgtatgaatttctattcttatctgtattttccatacttttagctgcacacagagcgc

SEQ ID NO: 272 - DNA, 853 bp, synthetic construct
  misc_feature 1..853: note = Description of Artificial Sequence: Synthetic polynucleotide
  source 1..853: mol_type = other DNA
gctgcacacagagcgcaggctaaaatggcagagttgcagagttgtgataaagaaatataggctgggcatggtggctcacgcctataatcccagcactttggaaggccgaggcgggcagatcacctgaggtcaggagctcgagaccagcctggccaacatgacaaaaccccgtctttactaaaaatacaaaaattagcagggcatggtggcaggctcctgtaatcccagctacttgggaggctgaggcaggagaatagcttgaacctgggaggtgggggttgcagtgagccgagatcacgccactgcattccagcctgggtgacagagtgatactccatctcaaaaagtatggccgcgaaactcaaaatatttactgcctggacttctttcagaaaaagtttgccaaccctcgatctagcagatcaaatactataaaatacaccttttgaaacaggctttctggggaaaaaacaaaacaggttatttccaacaaatgattattgagcacctgagtgtaagtgttgtcctgtgaatttcaggaaataaacagatgcatctttaataatcctgcccttaagaaaattacagcccagcaggaaaaaaaaaatcagaaaagaagataaacaattttaaagtgtcaaagctcaaaaagccacccaaaatcttaactttctaaaaacgtggcccaaatctcagtaattataatgataagaagattaaaagcaagagaagttcaataactgagctgaagtcacacagccaggtagagaggcagggcttgaatccctatctttgtttcttccttgcatactacaccatttgatttaatcattttatttgttcaacatttacc

SEQ ID NO: 273 - DNA, 832 bp, synthetic construct
  misc_feature 1..832: note = Description of Artificial Sequence: Synthetic polynucleotide
  source 1..832: mol_type = other DNA
gctgcacacagagcgccctttttaaaaaatgttttattaatgttgtttaagtttctcattgtgttcttgtattatttttctgatttcattaagttgtttatgtcctgttgtagctcactgagcttccttagaacaattaccttgaattctttgtcatccaatttatgtatttcaatttattttgaaataataattcaaaacatttatgcacctaattacacagactcaaaatgtatacaacaaaaacggacagaaattaaaggagaaatacacatttatagttggaatgatcaacactgctttcccagtgattcataaaataagtaaatggaaaattagtaaaaatataaatgacttgaaaaccactatcaactagacttccctcaatgacatttataaaacaccttactcacgagggacagaatacatgttcttttcaagcatatattctagaccataaaacacatttttacacatttaaaaattaaaaccatacaaagtatgttttctaaccacaatggtattaaatgagaaataagcaacagaaagatgtacggaagatctccaaattttaaaaaactaaatagcatacttcttagtcaccataatcaaagaagaaatcaaaagataatgtagagaatatttgaactaaatgaaagtgaacatatactaaaatttgcaggatgctgatagagcagtacttacaggaaaatttatagcattaaagaaaggtctcaaattaataacctaactttccattttaagaaactggaagaagctaggtgcagtcttgcatgcctataatctcagctactcaggaggctcaggaagg

SEQ ID NO: 274 - DNA, 804 bp, synthetic construct
  misc_feature 1..804: note = Description of Artificial Sequence: Synthetic polynucleotide
  source 1..804: mol_type = other DNA
gctgcacacagagcgcctgtcattttttgacattttaataattgcccttctgactggagtgaggtggtatctcattgtggtttttatttgaatttctctaatgaccagtgatgttgagcttttcttttcatatgcttgttggctgcatgtatgtcttcttttgaaaagtatctgttcatgtcctttgcctactaatgtatttttaaagcagtagtaaaaactaatgaaaatattaacagtaaattctcttagaaaagataaaataccatgttgtagtctgctagttgtccttgaagctcttttatctcaacagctaaagtctcagccctgaaagcataaaataaatacattcataaatatgtacataaaaatatacataagaaaatgaacattacaaacaatatggatagctacaaagttagtattataagcacaaaatactgaatgaatactgaatacttattactcacctcttttcatatgacaaatatactgaattctcttgattgtacatttctattcccttctgaagtttattaacttcagttgtaagttcacttattttacttctattagaaaagaaataagaatgtcagcaatacttttaatccagaaaactctagttaagcaaaatttaaactttccattaatacgtaataataatataaatagttttgtgaaattcactaaaagaatgcagaaagtttaggtggcttatttcattaagaatgaggtatattctggctgggtgcggtgggtcaagcctgtaatcccaacactttgggaggccgaggcaggcgcatc

SEQ ID NO: 275 - DNA, 779 bp, synthetic construct
  misc_feature 1..779: note = Description of Artificial Sequence: Synthetic polynucleotide
  source 1..779: mol_type = other DNA
ggattaccaatgtgggccaccatgccccactaccatcaggtttttaaatttttaattttgaaataattatagatttacaggccattacaaagaaagtacagagaagtcccctgtacccttaatttagttccccccaatggctgcatgttatataactatagtacaatatcaaacccaagaatctgacattggtacattgtttgtatatagttctaggtcattttatcatgtgtagatttgtgtaactatcactggaaaccagaaaaaaaagtttcatcacaacaaagatttccctgcgggtgccaccacttaattagttacactcacttcccatggcacccaccccaccacaactactaatatgttctttttttttttgagacagtgtcactctgttgcccaggctggagtgcagtggcgcaacctcagctcactgcaacctctgcctcctgggttcaagcaattcccttgcctcagcctctcagtagctgggattacaggtgtgcaccaccacgcctggctaatttttgtatattttagtagagatggggttttgccatgttggccagtctggtcttgaactccttacctcaggtgatctgcctgcttcagcctcccaaaatgctgggattacaggcgtgagccaccacacctggcctcaccttcatttttgaaagatatttttgctgggtatagaattctaaatggacagagtttttttctttcattcattttaagatactgctccactttcttctcactagctgcacacagagcgc

SEQ ID NO: 276 - DNA, 722 bp, synthetic construct
  misc_feature 1..722: note = Description of Artificial Sequence: Synthetic polynucleotide
  source 1..722: mol_type = other DNA
gctgcacacagagcgcctcttggctctgccagctcctagcttggtgaacactggcaagttatatcatccctcagagcctcaatttgctcatctgcataaaaggtgtatgaaaaagaactgtaaatttctcacaataactcccacagattattagaaattaataaactcaaatatgaaatgtcgctagcatcaatgtgtgctaaataatgctaactcctctccatcccaacttacccactcctttaaaaaacaaaagcaaggtttctttgcagggacttttagaattcagggtcagaatataaatttcaagtcccaaagtgggcaaataaatcctggaacccaatggaagaatgtgtttctacatatattatttctgttatgtataatgggtgaatcatatctacaaaatatattttacatataattacaaaatgtatgaatctccttaatactcagactttataacttaatactttcataaaatctgtctaggcatgccttaatttatataagaagcagcattcctaaattcatttattaaagatttttttttcttttttcttttttttactttaagttgtgggatacatgtgcagaacgtgcaggtttgttacatagggatacatgtgccactgtggtttgctgcacctatcaacccatcatctaggttttaagccctgcatgcattaggtatttgtcctaatgctatccttccccttgcc

SEQ ID NO: 277 - DNA, 638 bp, synthetic construct
  misc_feature 1..638: note = Description of Artificial Sequence: Synthetic polynucleotide
  source 1..638: mol_type = other DNA
catcacaaagcagtttctgagaattcttctgtctagtttgtaagtgactatatcccgtttaccacgaattcctcaaagagctgcaaatatccacaagcagattctacaaaagaagtgttaaactgctctatcaaaagaaaggttcagctctgtgaattgaacgcacacatcaccaaggagtttctgagaatgcttctgtctagtttttatgtgaagatatttctttttccaccataggaaacaaagcactccaagtgaacacttatagattctacaaaaagtttgtttcaacactgctctatcaaggaaagtttcaagtctgtgagttgaatgcacacattacaaagaactctctgagaatgcttgggtctacttttatgtgaagataccctttgccaaccaattcctcaaagagttccaaatatccacacgcatatcctacaaaagctgtgtttcaatactgttgtttcaaaagacagattcaactctgttacttaaatgcacgcttctcagtgaagttcctgagaatgcttctgtccagtttttatgtgaagatacttgcctttccaccataggcaaaaaatggctccaaatgaacagttgcagatctcacaaaaagacagctgcacacagagcgc

SEQ ID NO: 278 - DNA, 12 bp, unidentified
  misc_feature 1..12: note = Description of Unknown: Motif sequence
  modified_base 7..8: mod_base = OTHER; note = a, c, t, g, unknown or other
  source 1..12: mol_type = other DNA
actacanntccc

SEQ ID NO: 279 - DNA, 14 bp, synthetic construct
  misc_feature 1..14: note = Description of Artificial Sequence: Synthetic oligonucleotide
  source 1..14: mol_type = other DNA
gcgctctgtgtgct

SEQ ID NO: 280 - DNA, 41 bp, synthetic construct
  misc_feature 1..41: note = Description of Artificial Sequence: Synthetic oligonucleotide
  source 1..41: mol_type = other DNA
cctgcaataatggccatgaggcaggcggatcacgaggtcag

SEQ ID NO: 281 - DNA, 49 bp, synthetic construct
  misc_feature 1..49: note = Description of Artificial Sequence: Synthetic oligonucleotide
  source 1..49: mol_type = other DNA
cctggcttctagagttttctttctcttctcaggcgcccacagatgagat

SEQ ID NO: 282 - DNA, 290 bp, synthetic construct
  misc_feature 1..290: note = Description of Artificial Sequence: Synthetic polynucleotide
  source 1..290: mol_type = other DNA
acccggccttggacacgccattttcaactccgtggtgcgttttttttttttttttttttttttgtaatggagttttgctcttgttgcccaggatggagtgcaagggatcttggctcaccacagcctctgcctcctgggttcaagtgattcttctgcctcagcctcccaagtagctgggattataagcacccaccaccacgcccagctaattttgtattttttagaagagatggagtttctccagttggccaggatggtctgtatatcctgacctcatgatctgcccacca

SEQ ID NO: 283 - DNA, 312 bp, synthetic construct
  source 1..312: mol_type = other DNA
tttttcttctctcttttttttttattttttgagatggagtttcactctgttgcccaggctggagtgcaatggtgcagtctcagctcactgcaacctccacctcccgggtttgagcagtgattctgcctcagcctcccaagtagctgggattacaggcacccaccaccatgcctggctaatttttgtatttttagtagagatggggtttcaccatgttggccaggctggtctcgaactcctgacctcaggtgatccacctgcctcggcctcccaaagtgctgaaattacaggcatgagccaccgcacctggcc

SEQ ID NO: 284 - DNA, 930 bp, synthetic construct
  source 1..930: mol_type = other DNA
tttttgtatttttagtagagatggggtttcaccatgttggccaggctggtcgaactcctgacctcaggtgatccacctgcctcggcctcccaaagtgctgaaattacaggcatgagccacccccagaactcttctctttcccaaaactaaaattctgcacccattgaacagtaactccccatttctcctttcccctaactcctggcatccaccattctgttttctgtctttacgaattttactacccttggtacttcctttaagtggaatcatacaatatttttctttttctgactggcttatttcactaagcataatatttttaaggttcaagcattttgtagcatatgtcagaatttcctttctttttaaagctcaataatattccattgtatgtatataccacattttacttaaccattcatccgtcagtggacacttgggttacttccaacttttagctattgtgaataatgctgctatgaacatgaatgtacaaatatctnttcgagnccctgctttcaattcttttgggtatatacccagaagtggaattgctggatcatatggtaattctatttttaattttttgaggaaccgccatactgttttccacagcggctgcaccattttacattcccaccagcagtgcacaagggttccaatttctccacatcctcgccaacacttgttattttctgtttttttgatagtagccatcctaatgggtgtgaggtggtatctcattgtggttttgatttgcatttccctaatgattagtgatgttgagcatcttttcatgtgcttattggccatttgtatatcttctttggagaaatgtctattcaagtcctttgcccatttttnaatcgggttgtttgtttttttgttgttgagttgtaggagttctttatatattctggatattaa

SEQ ID NO: 285 - DNA, 848 bp, synthetic construct
  source 1..848: mol_type = other DNA
tctcaccacctctactactgcctatctgcatctgggtgcacgtcctctgctattccttctgtttctacagaagctgtccatatttctaaggctaatcccttgcattttggtaccagacttccctgacctacacaaagatgatcaccccccaaaattgcctttctttcctgcatcaagttttttcttctctactgtattattcctattgcacattagcccaaaaaatgccgttgtttttccatcggtaaaaaaaaaaaatagagagaaaaagaaaaataatccattgccgccaatctatcttctagtcatttttccatttctctgttctccattctgcataaaccatttttacttgaattgtttatacttgctgtttacaacaaacctcctctttctctccaccccaatcagattttggtccacattcctcatgcagtggtcagtccttggtcctcaacctagtctagcctgcttgctggtgggtgtgctctcggggcatttgcttgtgtttgcacgacagctcagtccctcacttctctcaagtctttgctaataacactcttgcatccaagtcttccctgacctgctacttaaaaacaactcacccccacccctagaaatccctatcctcttccctacgctttatttttctccataatacttatcaccatgtagctgaacatgtattttactcacttttttttatattgtccatcttccctcagtgaattgaaagctccatgagggcaggaggttttgtttattgtgtttactgctttatccctagcacccagcacagcatatgtgatatagtagacactcaatacaaatctgatgtgtgtgtgtct

SEQ ID NO: 286 - DNA, 375 bp, synthetic construct
  source 1..375: mol_type = other DNA
tgatatggtttggctgtgtccccacctaaatctcatcttgaattgtagttcccataatccccatgtgtcatgggagggacccagtgggaggtaatttaatcctgggggcagttaccctcctgctatgtgtgtgtgtgtgtgtgtgttctcacgagatctgatggttttataaggggcttttcccccttcgctcggcacttctccttcctgccgccatgtgaagaaggacgtgtttgcttccccttccgccatgattgtaagtttcctgaggcctccccagccatgcngaactgtgagtcaattaaacctctttcctttataaattacccagtctcgggtgtgtctttattagcagcgtgagaacggactaataca

SEQ ID NO: 287 - DNA, 311 bp, synthetic construct
  source 1..311: mol_type = other DNA
ttttgctcttctttttttttttttttttgagagacggagtctcgctctgtctcccaggctggagtgcagtggcgcgatctcggctcactgcaagctccgcctcccgggttcacgccattctcctgcctcagcctcccgagtagctgggactacaggcgcccgccaccacgcccggctaattttttgtatttttagtagagacggggtttcaccgtgttagccaggatggtctcgatctcctgacctcgtgatccgcccgcctcggcctcccaaagtgctgggattacaggcgtgagccaccgcgcccggcc

SEQ ID NO: 288 - DNA, 892 bp, synthetic construct
  source 1..892: mol_type = other DNA
tatttacattattttaataggtaatgcaattacatcttctaaaattcagaaagcataaaagtacataagagaaaaactcatcatccagcccttgcccttgaggacgctagtttctacccacacagctaaaccttgttacaaattacttgggtgtattaccagtggcattgccaggtttaacaaataaaaacataggattcctgattaagtttaattttcagataaataattacatgctttttaagtagaagtatttcccaaatattacaagagacaatatatttaaaaaattgtttgatatccaaatttaactatgcgtcctatattttgtctggcaaccctaatccttcattgtatggatgtaccccaggttcttatgcaaatagagaaaatatgcactcttttattatcctccgtccctttcttttacagacaatgatagaatgctttatttagtacatacgtcattctgcacctgtgcgagtattttagttaaccacacttttggggattgttctgctatcataaaagatatttctcttttttaccataatgtatttcattaaaccctctttcacaggttaggtcccatatttttctttttttttttttttttgagagacggagtctcgctctgtctcccaggctggagtgcagtggcgcgatctcggctcactgcaagcctgataggtgaaaaatggtatctcagtgtagttttaatttgcatttctcttattatgagtgaggttgagcatcttttcatatgtttaagagccatttgtatttccttttctgtgaactgtctgtccgcctcccgggttcacgccattcttgggttgttggtctttttcttattgacctgcctcagcctcccgagtagctgggaaatcta

SEQ ID NO: 289 - DNA, 312 bp, synthetic construct
  source 1..312: mol_type = other DNA
ggtcagtcgcggtggctcatacttgtaatctcagcactttgggaggccaaggcgggtggatcacctcaggtcaggagttcaagaccagcctgaccaatgtggtaaaaccctgtctctactaaaaatacaaaaattagctgggcgtggtggcacatgcctgtaatcccagctactcaggaggctgaggcaggagaatcgcttgaacccgggaggcagaggttgcagtgagccaagataacaccactgcactccagcctgggtgacagagcaagactccgtctcaaaaaaaaaaaaaaaagatccagtgatagg

SEQ ID NO: 290 - DNA, 311 bp, synthetic construct
  source 1..311: mol_type = other DNA
tatctattcacatttatatgctcttagtcagaaaataaaatacctctcttgaaatgggcctgactccggagagggagaccagattcactgcaagctccgcctcccgggttcccgccattctcctgcctcagcctccccagtagctctgactacaggcgcccgccaccacgcccggctaatttttttattttttagtagagacggggtttcaccgtgttagccaggatggtctcgatctcccaacctcgtgatccgcccgcctcggcctcccaaagtgctgggattacaggcatgagccaccgcgcccggcc

SEQ ID NO: 291 - DNA, 311 bp, synthetic construct
  source 1..311: mol_type = other DNA
tttttttttctttttttttttttttcttttgagacggagtcttgctctgtcgcccaggctggagtgcagtggcgcgatctcggctcactgcaagctccgcctcccaggttcatgcaattctcctgcctcagcctcccgagtagctgggactacaggcgcccgccaccacgcccggctaattttttgtatttttagtagagacggggtttcaccgtgttagccaggatggtctcgatctcctgacctcgtgatccgcccgcctcggcctcccaaagtgctgggattacaggcgtgagccaccgcgcccggcc

SEQ ID NO: 292 - DNA, 311 bp, synthetic construct
  source 1..311: mol_type = other DNA
tgctgggcatggtggctcacgcctgtaatcccagcactttgggaggccaaggcgggcagatcacgaggtcaggagttcgagaccatcctggctaacacagtgaaaccccgtctctactaaaaatacaaaaaattagccgggcgtggtggcgggtgcctgtagtcccagctactcgggaggctgaggcaggagaatggcgtgaacccaggaggcggagcttgcagtgagctgagattgcgccactgcactccagcctgggtgacagagcgagactcctcttcaaaaaaaaaaaaaaaaaaaaaaagactcat

SEQ ID NO: 293 - DNA, 312 bp, synthetic construct
  source 1..312: mol_type = other DNA
ggccgggcgcggtggctcacgcctgtaatcccagcactttgggaggccgaggcgggnggatcgcttgagcccaggagttcgagaccagcctgggcaacatggcgaaaccccgtctctacaaaaaatacaaaaattagccgggcgtggtggcgcgcgcctgtagtcccagctactcgggaggctgaggcgggaggatcgcttgagcccgggaggtcgaggcttcagtgagctgagatcacgccactgcactccagcctgggtgacagagcgagactctgtctcaaaaaaaataaataaaaaataaaaataaaa

SEQ ID NO: 294 - DNA, 312 bp, synthetic construct
  source 1..312: mol_type = other DNA
ggccgggcgcggtggctcacgcctgtaatcccagcactttgggaggccgaggcgggcggatcacctgaggtcaggagttcgagaccagcctggccaacatggtgaaaccccgtctctactaaaaatacaaaaattagccgggcgtggtggcgcgcgcctgtaatcccagctactcgggaggctgaggcaggagaatcgcttgaacccgggaggcggaggtttcagtgagctgagatcacgccactgcactccagcctgggtgacagagcgagactctgtctcaaaaataaataaataaataaaaaataaaaa

SEQ ID NO: 295 - DNA, 1039 bp, synthetic construct
  source 1..1039: mol_type = other DNA
tatcgaaaattcacccccgatattcacgtaggttcttttctattttccctaagcgtcggcaggtttgagaaataaagggacagagtacaaaagagagaaattttaaagctgggcgtccgggggagacatcacatgttggtaggttccatgatgccccacaagccgtaaaaaccagcaagtttttattagtgattttcaaaaggggagggagtgtacgaataggtgtgggtcacagagatcacgtgcttcacaaggtaatagaatatcacaaggcaaatggaggcagggcgagatcacaggaccacaggaccggggtgaaattaaaattgctaatgaagttttgggcaccattgtcattgataacatcttatcaggagacagggtttgagagacaaccggtctgaccaaaatttattaggtgggaatttcctcgtcctaataagcctgggagtgctatgggagactggggcttatttcatcccgtagaggcaaccataaaagacaggcccaagcggccatttagagcctcccaggacattctctttctcagggtgttccttgctgagaaaaagaattcagatatttctccatttgcttttgaaagaagagaaatatggctctgttcccggctcacggcgcagatttaaggttatctccttttccctgaacaattgctgttatcctgttcttttttcaaggtgcccagatttcatattgttcaaacacacatgcttacaatttgtgcagttaagcaatatcacagggtcctgagggacatacatcctcctcagctgacaggattaagagattaaagtaaagacaggcataggaaatcacaagggtattgattggggaagtgataagtgtccatgaaatcttcacaatttatgtttagagattgcagtaaagacaggcataagaaattataaaagtattaatttggggaactaataaatgtccatgaaatcttcacaatccacgttcttctgccatggcttcagccggtccctccgttcggggtccctgacttcccgcaaca

SEQ ID NO: 296 - DNA, 355 bp, synthetic construct
  source 1..355: mol_type = other DNA
tgatatggcttggctgtgtccccacccaaatctcatcttgaattgtacgttccataattcccatgtgttgtgggagggacccagtgggagataattgaatcatggggagcagtttcccccatactgttctcatggtagtgaataagtctcatgagatctgatggttttatcaggggtttctacttttgcatcttcctcattttcctcttgccaccaccatgtaagaagtgcctttcacctcccaccatgattctgaggcctccccagccatgtggaactgtaagtccaattaaacttctttttcttcccagtcttgggtatatctttatcagcagcatgaaaatggactaataca

SEQ ID NO: 297 - DNA, 311 bp, synthetic construct
  source 1..311: mol_type = other DNA
ttttttttttttttttttttttttttttttgagacggagtctcgctctgtcgcccaggctggagtgcagtggcgcgatctcggctcactgcaagctccgcctcccgggttcacgccattctcctgcctcagcctcccgagtagctgggactacaggcgcccgccaccacgcccggctaattttttgtatttttagtagagacggggtttcaccgtgttagccaggatggtctcgatctcctgacctcgtgatccgcccacctcggcctcccaaagtgctgggattacaggcgtgagccaccgcacccagcc

SEQ ID NO: 298 - DNA, 311 bp, synthetic construct
  source 1..311: mol_type = other DNA
tttctttacttcaaccttctttttttttttgagacagagtctgctctcgttgcccaggctggagtgcaatggcgcaacctcagctcactgcaacctctgcctcctgggttcaagcaattctcctgcctcagcctcccaagtagctgggattacaggcatgcgccaccacgcccagctaattttgtatttttagtagagacggggtttcaccatgttggccaggctggtcttgaactcctgacctcaggtgatccacccgcctcagcctctcaaagtgctgggattacaggcgtcagccaccgcactcagcc

SEQ ID NO: 299 - DNA, 311 bp, synthetic construct
  source 1..311: mol_type = other DNA
ggccgggcgcggtggctcacgcctgtaatcccagcactttgggaggccgaggcgggcggatcacgaggtcaggagatcgagaccatcctggctaacacggtgaaaccccgtctctactaaaaatacaaaaaattagccgggcatggtggcaggcacctgtagtcccagctactcaggaggctgaggcaggagaatggcgtgaacccaggaggcggagcttgcagtgagccgagatcatgccactgcactccagcctgggtgacagagtgagactccatctcaaaaaaatgacacaaaataaaataaaataa

SEQ ID NO: 300 - DNA, 312 bp, synthetic construct
  source 1..312: mol_type = other DNA
ggccgggcgtggtggctcatgcctgtaatcctagcactttgggaggccgaggctagcggatcacctgaggtcaggagtttgagaccagcctagccaacatggcgaaaccctgtctctactaaaaatacaaaaaatggctgggcatggtggcagacatctgtaatcccagctactcaggaggttgagacaggagaattgcttgaactcaggaagcggaggttgcagtgagctgagattgcgccactgcactccagtctgggtgacagagcaagactctgtctcaaaaaaataaaataaaataaaaataaaata

SEQ ID NO: 301 - DNA, 311 bp, synthetic construct
  source 1..311: mol_type = other DNA
ggccgggcgtggtggctcatgcctgtaatcctagcactttgggaggccgaggctagcggatcacgaggtcaggagtttgagaccagcctagccaacatggcgaaaccctgtctctactaaaaataccaaaaaatggctgggcatggtggcagacatctgtaatcccagctactcaggaggttgagacaggagaattgcttgaactcaggaagcggaggttgcagtgagctgagattgcgccactgcactccagtctgggtgacagagcaagactctgtctcaaaaaaataaaataaaataaaaataaaata

SEQ ID NO: 302 - DNA, 634 bp, synthetic construct
  source 1..634: mol_type = other DNA
ttcttctcacggagtgaaacttttcctttgattgagcagtttcgaaactctctttttgtaaaatctgcaagtgaacatttggagtgctttgtggcctatgatagaaaaggaaatattttcacttaaaatctagacagaagcaatctgagaaacttctttgtgatgtttgtattcatcttacatagttaaacctttcttttgattgagcagttttgaaactctctttttgtcgaatctgtaagaggacatttggagtgctttcaggcctatggtgaaaaaggaagtatcttctcatgaaaactagacagaagaattcagacaaacttctttgtgatgtgtgcatttatctcacagacttgaacctttcttttgattgagcagtttgaaacactctttttgtagaatctgcaagtggacatttggagcacgtggaggcctatagtggaaatggaaatgtcttcacactaaaaactagacagaagaattctgagaaacttctttgtgatctttgcattcatctcacagagttgaacctttcttttcattgagcagtttgaaaacactctttttgtagaatcggcaagtggacatttggaacgcattgcagactatgatggaaaaggaaatatctcca

SEQ ID NO: 303 - DNA, 135 bp, synthetic construct
  source 1..135: mol_type = other DNA
cagcgcaagtaatatatcctggaattggaagcagaatgggaactatggactcagtgaagattgttctggacattatttgattcttctttctcgctgccaattggatactttttttttttttttgagacagagtct

SEQ ID NO: 304 - DNA, 134 bp, synthetic construct
  source 1..134: mol_type = other DNA
cagcgcaagtaatatatcctggaattggaagcagaatgggaactatggactcagtgaagattgttctggacattatttgattcttctttctcgctgccaattggatacttttttttttttttgagacagagtct

SEQ ID NO: 305 - DNA, 773 bp, synthetic construct
  source 1..773: mol_type = other DNA
ttcatcttacagagataaacatttatcttgattcagcagtttggaaacactgtttttatccattctgtgaatggacatttgggagttcattaaggcacacatgaaaaggtgtatatcccagggtaaaaactagaaggaagctatctgagaaaccactctgtggtgtgtgcattgatctcgctgatttaaagctttcttttgattcagcagtttggaatcactgtttgtgctcattctgtaaatggatatttgggagctcattgaggtcaatggcaaaaaagtgaataactgaggataaaaactagaaataagctatctgagaaacggatttatgatgtgtgcattcatctcgcaaaattaaacatttcttttccttcaacagtttggaaacacggtttttataggatctgcaaagggatattttggagcacattgaggtctatggtgtaaaagaaaatatcttcagataaaacctagaaagaagctttctgagaaattgcattttgatgtgtgcattcatctcacagagttaatacttttttttgattcaccagtgtggatacactgtttttgtccattctgctaatggacctttgggggctcatttaggccaatggcaaaaaagtgaatatcccaggataaaaactagaaggaaggtatctgagaaactgctatgtgatgtgtgccatcatctcacagtcttaaaagtttcttttcattcaccagtttggaaacagtgtttttgtagaatctgcaaagtcatatttttgagt

SEQ ID NO: 306 - DNA, 927 bp, synthetic construct
  source 1..927: mol_type = other DNA
gatgaatgcacatatcacaaaaagtttctcagattgcttctgtctagattttatgtgaagttatttccttttctaccatagaacccaaagcacttataatgtccccttgcagattctacaaaaagaatgtttcaaaactgctcaatcaaaagaaaggttcaaatttgtgagatgaatgctcgcatcaccaagaagtttctcaaaatacttctgtctagtttttatgtgaagacatttctttttccgtgataggtctcaaaatgatcaaaatttccacttgcaaattctacaaaaagagagtttcaaagctgctcaatcaaaagaaaggtttatatctgtgagatgaacacacacttcacaaagcagtttctaagatttcttctgcctagattttatgtaatgatatttccttttctaccatactttgcaaactgctccaaatgtccacctgtagattctacaaaaacagtgtttccaaactgctcaatcaaaagaaaggttaactctgtgagatgaactcacacatcacaaagaagtttctcagaattcttctgtctagttctaatgtgaagatatttccttttggaccagaggccccaaggctatcgaaatgtccccttgtagattctacaaaaagagtatttcaaaactggtccatcaagagaaaggctcaactctgggagatgaatgcacacatcacaaagaagtttctcagaatgcttctatctagtttttacatgaagctatttccttttccaccataagcctcaaagcgctccaaatgtccacttgcaggttctgcaaaaagagagtttccaaagttctcaatcaaaagaaacggttaactctgtgagataaatgcacacatcacaaagaagtttctcagaatttttctgtctagtttttgtgtgaagatatttcattttc

SEQ ID NO: 307 - DNA, 312 bp, synthetic construct
  source 1..312: mol_type = other DNA
agccaggtgcagtggctcacacctgtaatcccagcactttgggaagctgaggcgggtggatcacttgaggtcaggagttcgagaccagcctggccaacatggtgaaaccccgtctctactaaaaaagtaaaaattagccaggtgtggtggcgggcacctgtaatcccagctactcaggaggctgaggcaggagaattgcttgaacccgggaggcggaggttgcagtgagctgagattacaccactgcactccagcctgggcaagagagcgagaatccgtctcaaaaaaaaaaaaacaaaaaaaacaaaaaac

SEQ ID NO: 308 - DNA, 268 bp, synthetic construct
  source 1..268: mol_type = other DNA
aattacaacaacccttaatatttgtaaagcgcttgataattcagggagggcttttaaaaacttctatccatctcttccccccagcaatcctatgaggtaggcagggctggaatcatttgctgcattttatcgaataggaagccatgactcgtagaggtctggtgacttaactgaggtcacccactgaggacgtggcagagctgggtcctgaatctgtggccctcaggctctttgcctggccctgcctcacatagactacgctgcctct

SEQ ID NO: 309 - DNA, 312 bp, synthetic construct
  source 1..312: mol_type = other DNA
tttcttactttttttatttatttttttcttgagacagggtctcacttggtcacccacgctgaagtgcagtggcgtgatcttagcccactgcaacctctacctcccgggctcaagcgatcctccctcctcagcctcctgagtagctgggaccacaggcatctgccaccacacccagctaatttttgtatttttagtagagatggggtttcaccatgttggtcaggctggtctcaaactcctggcttcaagtgatctgcccacctcagcctcccaaagtgctgggattacagatgtgagccactgcgcctggcc

SEQ ID NO: 310 - DNA, 312 bp, synthetic construct
  source 1..312: mol_type = other DNA
ttgatttttttttcttttatctttttttttgagacagagttttgctctgttgcccaggctggagtgcagtggcgtgatcttggctcactgcagtgtccgcctcctgggttcaagcgattctcctgcctcagcctcctgagtagctgggattacaggcatgcaccaccacgcccggcttcattttttatttttagtagagacagggtttcaccatgttggtcaggctggtctcgaactcctgacctcaggtgatccacccgccttggcctcccaaagtgctgggattacaggcgtgagccaccgtgcccggcc

SEQ ID NO: 311 - DNA, 312 bp, synthetic construct
  source 1..312: mol_type = other DNA
ggctgggcatggtggttcacgcctataatcccagcactttgggaggccgaggcaggcagatcacctgaggtcgggagttcgagaccagcctgaccaatatggtgaaaccccgtctctactaaaaatacaaaaattagccgggcgtggtggtgcatgcctgtaatcccagctacttgggaggctgaggcaggagaatcgcttgaacccaggaggcggaggttgcagtgagccgagattgcgccactgcactccagcctgggtaacagagcgaaactccgtctcagaaaaaaaaaaaggcagatatgaaaaagg

SEQ ID NO: 312 - DNA, 520 bp, synthetic construct
  source 1..520: mol_type = other DNA
aatattaatttgggctctccagagaaacagaaccaatagattacacatagatatatagaaagacagttattacaaggaattggctcacaggattatgtaggctgagaagtcccatgacctgccgtctgcaagctggagacccaggaaagccggtggtgtagttccagtccgagttgggaggtctgagaatcgggagagctgacagagtaagctctagttgcagcctggagtccagagggcaaagaacacctatgtcccatctcaagcacggtcaggcgtcccagctcaagcagagagaaagaagactttcctgctcagcctccttgctctaagcagcctcccgacggattggatgaagctcacccacgctggggagggcagccaccttcactcagtccaccaattcaaatgctaatctcatccagaaacaccctcacaggcacacccagaaataatgtttagccacatatctgggcatcctgaggaccagtcaaattgactcataagtctcaccatcata

SEQ ID NO: 313 - DNA, 312 bp, synthetic construct
  source 1..312: mol_type = other DNA
ttatgactattatttcttttttttttttttgagatggagtctcgctctattgcccaggctggagtgcagtggcatgatctcggctcactgcaacctctgcctcccgggttcaagcgattctcctgcctcagcctcctgagtagctgggattacaggtgcctgccaccacacccggctaatttttgtatttttagtagagatggggtttcactgtgttggccaggatggtcttaaactcctgacctcaagtgatccacccacctcggcctcccaaagtgttgggattacaggcgtgagccaccatgcccggcc

SEQ ID NO: 314 - DNA, 517 bp, synthetic construct
  source 1..517: mol_type = other DNA
ctccatgttctgacctcaggtgatctgcccgcctccgcctcccataagttccttctgcacctattccattccatctgcaatgtcatcctggccaacctgtgaatgggtatagcaggatagtaagttagtcccagtgtttaggcagactccatagaccagatttaacgtgtttgtataaaccgcatggctcgctcttactcagccttcgggtcggccttaagatacacagttttaagaaaagcattgtcttcactcttagtgtagatcaggtcctcctcncccccancacgttatgtccctgtcattgaacattatacttttatgaagaattgtgagctgtctgagattttaccttacttgcaaactaacaagtgggcctgccatagtttcatgtctggcagaagactccaacaggtcagagattttcatctgtcttgttcactattgtctacatagtgcctggaaaaatgcctggcacacagtaaaccctcaatcagtattttatgaatgagtgaac

SEQ ID NO: 315 - DNA, 448 bp, synthetic construct
  source 1..448: mol_type = other DNA
tgtgttagtcaggataggctaacctctgtaacacacaaccccaatttttcagtggctcagaacaataggagtttctttcttactcatgtaaagtccaggtgtggcagaaacttgcgggggagaaagtctactccacagcatcactcagggacccaggctcctgccttacggtggttccgccattttccagggcctcggagtcctccatcccatctcctccattcagctggtggatgtgggaggagagcgtgtatgaaagaccacacagaagctttttttgggccaggctttgagacggcgcacatcagtttcgctcttgttgcccaggctggagtgcaatggcgcaatctcggctcaccgcaaaagacactgggaaatttggtctggccatgtgtctaggaagcagaggagatggggtttcataaactcctgaactctctctaccacg

SEQ ID NO: 316 - DNA, 312 bp, synthetic construct
  source 1..312: mol_type = other DNA
ggccgggtgcagtggctcatgcctgtaatcccagcactttgggaggccgaggcgggtggatcacctgaggtcaggagatcaagaccatcctggctaacacggtgaaaccccatctctactaaaaatacaaaaattagctgggcgtggtggcaggcgcctgtagtcccagctactcgggaggctgaggcaggagaatggcgtgaacccaggaggcagagcttgcagtgagccgagattgagccactgcactccagcctgggggacagagcaagactctgcctcaaaaaaaaaaaaaaatggaaaaaaaaaaaa

SEQ ID NO: 317 - DNA, 268 bp, synthetic construct
  source 1..268: mol_type = other DNA
aagatggggaggatggtggtggagcaggctggggagatgaggagcttgaggggcctaggagctaaccacccattcactgtttatgggtggggtggctccgggcaggtggcctgacccctctaaacctcagtttccccatctgtaaaatgggagtaattgtacctgcctcacgggcatgtagcaggtgggagagagagtaatacgggcaagacgtctagtgcagtggctggaacataacaagcacccagcaagtggtggccccattgct

SEQ ID NO: 318 - DNA, 312 bp, synthetic construct
  source 1..312: mol_type = other DNA
ggccgggcacggtggctcaaacctataatcccagcactttagaaggccaaggcgggcagatcacctgaggtcaggagttcaagaccagcctggccaacatggtgaaaccccgtctctactaaaaatacaaaaattagccaggtgtggtggcgggcacctgtaatcccagctactcgggaggctgaggcaggagaatcacttgaacccaggaggcggaggttgcagtgagccgagatcatgccactgcactccagcctgggcaacagagtgaaactctgtctcaaaaaaaaaaaaaaaaaaaaaaaaaaaaaa

SEQ ID NO: 319 - DNA, 3809 bp, synthetic construct
  source 1..3809: mol_type = other DNA
aaatcgaattctctgtctccaattgcttcttgctttcaagggacccaagcaggaggctgctccgccacatataaatgtaggacctgaagaagcagtctgcagctcaaggctggaattggcctagatcctccctggaggcccagattcacagtgtaatcgttccaagccattaatcacaggcacccggcgggactgtgtctcgtcccaaagggcatctcaagaggttttgcagagtttcatgtaaatgatcattacactactaataaatatggttagtgactttgagccacatcaggtgccttgggccaaggagctggcggaaggagtatctaggcttccttaagtgaaggcactgaacagccagcagaattaatccatcaactgctctcctttcttccccacttctcatacacacacacacgcacacgcgcgcatgtacacacacgctggcgagagttttagaccagagcaccaagccctccaatgcccatgttaagaaaatatgaagttaatatgctcggcttcctgttgaagtccgcctcattcccactaactgatcaggatacactcacagttcacccgcaagagcagacaacaaatgaggagagatagggcaacggcacctctgtctgcagcatttttaaaaatatagatacctactctttcaaacagatttgaagtgagaatatggtttctatgataatacccaaaaatgaactgcataaaccattgcctaatgctgaacagcactcctcgattcttcctaaatctatactcgcagttcttatgcaagaaaaaggtaacaacatccctgttctccatgcttccattttacttcacatctggactgtcactgcaaacagctgaatctgattttaaaaaggtacacatataccactttcattatcaatgtcttatacaaattacctgatacatgtagttacttagaaattatttcccattgcttcaatatctatgaacaaaaagtaaacactacataagataaaataaaccaaaatattaatgaggctcacagaactactgatgaataagctcagaaaactgttagtattttttatactatgtgaaaccaaagaccgatcaagaaaatgtatttactaactgtatttaataaccactgcaataagactgaatgacttaagcaaagataaattgataaaagggccgggcacggtggctcaaacctataatcccagcactttagaatggccaaggcgggcagatcacctgaggtcaggagttcaagaccagcctggccaacatggtgaaaccccgtctctactaaaaatacaaaaaaaattagccaggtgtggtggcggtgcacctgtaatcccagctacttcgggaggctgatcaagtggcaggagaatcacttgaacccaggaggcggaggttgcagtgagccgagaactgcactccagcctgggcaacaagagtgaaactctgtctcaaaaaaaaaaaaaaaaaaaaaaaactgaagcaatcaaagcggctagtaaaagacttacagaaaaagttgatttgtaatagagggtcaatctggcacaactgtagattacctataaatgtttagaattatcctctcttctaaaatgcaaacagaatcagcatgcaaaataactttggcttacatgattcaattctagtcatctaacaaaagaatttactccaaatccgggaagttatggccagcctggagggctaagaagaatctgaaatagaaagaaatttttattatttaaatacttcccctctcttctgctaaacaatctctttaggcttgatgggcaaaaaggatgtcgcaagtttctacattcttctaaaaaactcagtactttaaaagctgatagagaaattcagtcacccaaaggagtcagctgtcacagaaaatgttatctaatagtggaaagattacataatgccgatctgcactcgtatctaatagagattttgaagaactaaggaattaggcctcctaagataaaatctttgcagcatgcaatgagcaagtataaagatctcattctcttcccaggtgactggacaagggaaagattcaagcaagcctctgggaagcggggaatatttcaaggagacttacttatttcaacaaacatttacttgggactggaccatctatgctgggcctaggactgtgctaggagctgatgatacatggatgaacaggattaacatcatataagaaatgatttgttctacgtggacgtactgaatctctaagccaacactaaaatcaaatttcatatactgccaaaaatcaccaagaactttagtgatgatatacaaatggagtttgatatggaaaactggaggccaataaaaatgaggaaagaacaacttcctataacagattagttccctagtaggaaaaaccatgttattaaagctctaagttagggtaacatttaggagtatctaggcttccttgagccaaaacaggttaatctcatcagttttagatcataacttaagaaaatatgaagttaatatgcttagaaagtactaaaaccacacattaaaagaggcaataagaccaaggcaataaatttacttgtagtaccggttccgagacacttatttggtattagaaagccatctaataaaggttaaaatattagagaacataaactataaatgtcaatgacacaaaatctaatctatcatcttaaagctgcaatcgagaggatcactcttacaaatgatagaattaaaaagagggtaattagcatcaaaaattcattttttttcctgaatttaaaactatagggctatttttacagcaaatcaaatgtagagcggtgaaaaataggccccaaaaccgatcncagtgttatgccagcagaacctgaagaaacacatcatggtcctctggtaagtaagctgatgacctaacagcaaattcagacacagaaacaaaaggaactttcaggtgtctacacacatatcattaagaaagattatgtggcagatgctacatcacatttacgtctcaggaaagaccatgtggcccagagatgagggatggtttttatgtcaattcaagtaaaagtggttgcccctaaaaataaccacatctgtatacataaagaaagcttgtctgatgatacatgcagaagatgagaaaaggcttaagtggaaaatgaatataaaattggataatgtgtcaccttggctgacatggattacaccaacaagcatagtaattctgctaagattacataccaataattagctttccagtgtgggactgataatggattaacatagttccattaacgttaactcaagattattttagaaaataactgtaaacgcctgctcagattcagccatataacaggatactagcaagttcttactaacagaccagacattctgctgcttgattcatcttttaatttggtagaacttactaaaataaccttttctcttaaatggcacatccaaaaaccctcacagaaaaaaatatttaaaagtatgtaatccccagtgagattcaaaatattgtggagataataaccaaacagaacaaatgcaccaaccatctcggcgatcacaataaacacaagattaaaaatcaaaaacataactttgcagtaaccttgtgactagctggtatcagagcagcacgcaaatctgacagaaaacagcaattaaacaaaggcatttctgtcttgacaacagacttctataaaacaaggaactaagggccgttttggtaagaaatagaaaggccagattaatcagaggaatgaaattaatattta

SEQ ID NO: 320 - DNA, 291 bp, synthetic construct
  source 1..291: mol_type = other DNA
acagtggcacacgcctgtagtcccagcacctttggaggctgaggtgggtggatcacctgagtccaggagttcgagaccagcctgggcaacatggcatgaccctgtctctgcaaaaaatatgaaaattagccaggcatggtggtgcgtgcctgtagtcctagctacttgggaggctgaaataggaggatcgcttgagcccaagagttgaaggttgctgtgagccaagatcgcaccactacaatccagcttgggtgtcagagtaagaccctgtctcaaaacaaaaagataaat

SEQ ID NO: 321 - DNA, 261 bp, synthetic construct
  source 1..261: mol_type = other DNA
gtatttagattcccagactttggagccagatcggctgagttcaaaccctgtctgtgcaactatcagctgttcagctgtgtgaccttgggcaagttacttaacctctctgaaccctgattcctcctgcaaacggtgggaaaaataatagaaccaatctctctgggttgctgtaaggattaaattaatttacagtgcatgtaacatgcttacagcaatgtctggcacacagtaagcactaagtatttgttgttatttgtcatc

SEQ ID NO: 322 - DNA, 4705 bp, synthetic construct
  source 1..4705: mol_type = other DNA
aggattcatcaccttctgacttaggagctgctggtctctgaataacctacagtggtaccccaataacacatcatgaacattggactccgagatgtgctggcttcaggtgtgacccagaacatttcccactgtggtgggtatagtgaaagacaccttctgtttgagcaaagcagaggaaaaagtaaatgggattctgtcttgcacctgaggtaccagcttggccacagtggggtagagcaccaagcagactcttagggtccctgagtcagcatttctggacctgccctgcaccaaagagtaagtcccagttgtggaagcagtcatcataagctgactgaagagtgcttgggtgttgagtgaacatcagtgatagcccagtggaaacccctgtgggctggtggtggtggcagacacattgtgaggctcctctgcctgcagaaaggggagggaggagtggtaaggatgttgtcttgtaatttgaatgccagcttagctgcagtagaatagaacacgagataaataaggcttctgacttcaatacctggctcccacacaatatctctgaacctacctggggccaaagggaactcactgccctgaggagacacaaacctggctggttaccacctgctgattgtagaggcctaaggtcttgagtaaacttaggtggtagccaggcagtaattacactgggccttgggtgacacccagtgctgtgctcacttcaagtctaaattagcacagtcccagtggtgggggcaacagggaagcttatgtcatcccaccccagctccaggtagctcagcatagagaaagaaattccattcgtctggaagaaactaagggaagagaacaagagtctctgcttggtaatccagataattcatcgattttaaccaagaccaaccacatggtacctctatgagtctgcaagaacaacgttattgagtttgagatccaagtaccttcaaattctggaaagccttcccaacaagggtggacacaaagcccagactgcgaaggctacaataaatgcctaactcttcaatgccaagacacagatgaacatctacacattaagaccatccagtaaaatatggcctcacctaacaaactgaataaggcataagaggccaatcctggagaaacaaaataagtaacttttcagacagatgattcaacatagttgtgttgaggaaacaaattcaagataaaatagagaaggaattcagattctatcagataaatcaaacaaagaggttgaaataattaaaaggaatcaagcagaaattgaagttaaaaaagcaattggcatactgaagaatgcatcagtctcttaatagcaaaactgatcaggcaaaagaaaaaattattgagcttgaacataggcaatttgaaaatatgtagagaagacaaaaaagaatgaagtatgcctacaagatttagaaaacaccctgaaaagggcaaatctaagagttgttagccttaaagagagaaagagaaaggggtagaaagtttcaagaatacgatcagagaacttcccaaatctataaagatatcaatatccaagtacaaccaggttacagaacacaaagcagattgaacccaaagacgactacctcaagacatttaataatcaaactcccaaaaattaagaataaaggatcctaaaagcagcaagaaaaaagaaacagcatacaatgaaactccagtacgtctggcagcagattttcagtggaaatcttacaggccaggagagaatagcatgacatatttaaagtgctgaagtagcaaagcttttacactagaatagtctatcccgtgaaaatattccatagccatgaaggagaaaaaaatgaccttcccagacaaacactgagagatttcattaaaaccagacctgtcctacaagtaatactaaggggcattctcttccatctgtaagaaaagaatgttaatgaacaataagaagtcatctgaaggtacagaactcattggtaatagcacagagaaaaactgagtattataatatggtaactgtggtgtgtaaaatactcaagtagaaatactcaatgatgactcaatacaactacaacaatgtttcaagacaaagacagtacaataagacataaagagaaccaacaaaaagttgaaaaatggggaagcaaagttaaaggtagagtttttactagttttcttattgcttatttgttcacttaggcaatcagtgtgaagttgtcagcagttaaaacaataggttataagatagtatttgtaagtttcatggtaacctcaaataaaaaaacatacaacagacacagaaaccaaaaagcaagaaattaaatcataccaccaagaaaaatcatgttcactaaaatgaagacagaaaggaaggacaaaagaaagagaagatgcaaaaacaaataacaaaatggcaggagtgaacacatacttatcaataataatgctgaatggaaatgcactaaacactccaattagatgacatagaatgggtgaaaaaaagaaaaaggaagacccaattatctgctgcccacaagaaatacacttcatctataaagatacacatagactgaaaaataaaagaatggaaaaatgttccatgccaatgaaaacaaaaaaaaagaaccaaagtagctatacttacatcagataaaatatatttcaagataaaaactgtgaagacagaacaaatgtcattttatgataaagggatcaattcagtcagagaatataacaattttaaatatccatgcaccctacactaaagcactgagacatagagtattagagctaaagagagaggccccaatacaataataattgagacttcaacacaccactttcagcattgtacagatcttacagatagaaaatcatgaaagaaacatcagacttaatctgtgctataaaccaaatatacctaataaatatttgcagaacattttatctaatggctacagaacacacattcttctcagcacatagataattttcagatacacaacattttaggttacaaaacaagtcttaaaacattcagaaaagtgaaataatatcaaacatctctgcccacaatggaatataactagaaatcagtaacaagaattttggaaactatacaaacaaatgtaaattaaacaatacgctcctcaatgaaaattggatcagtaaagaaattaagaacgaaattgaaaaatttcttcaaacaaataatgaaaaaacacataccaaaacctatgggatacagcaaaagcagtactgagaaatgtatagatatatgtgcttacatcaaaaaagaaaaaaatcatataacctaatgttgcatcttaaagaaaaaacagcaaaacaaaaattataataaacatcacagcagaaataaaattcaaataaaaaatacaaaaaaaatcaatgaaatgaaaagttgatttttttaagcagataaataaaatttacaaacctttagcttgactaagaaaaaaagaagacccacataaaaccagagatgaaaaaggagacattataactgacactgcagaaattcaaaagattattagtggctattattaacaactgtatgccaactaattggaaaatctaacaaaaatgggtaagttcccagatatatacaacttaccaagattaaacaacgaagaaatccaaaacatgaacagaccaataagaagtaacaagttcaaagccataataaaaagtctcccagtaaagaaaagcccaggacctgatggcttcaccactaaattctacccaacatttaaagatctaataccagctctactcaaaaacttccaaaacacaggaggaaggaatacttcccaactcattctttgaggccagtattaccataatacccaaatcagaaaaagatacatcaaaagatgaaaactgtacgccaatatctataataaatatttatgtaaaaataacaaagtgttagcaaacagaattcaacaacacattaaaagattgttcattatgacaaagtgggatttatcccagggatgcaagaatggttcatcatatgcaatcaatcagtatgatacatcaacagaatgaaggacaaaatcatatgatcatttcaactgctgctgaaaaaaggatttaataaaattcaacatcctttgataataaaaactctcaaaaagctgggtatagaaagaacatacctcaaaataataaaaaccatatatgacagatccacagctagtatcatcctgaatggaggaaaaaaatctgaaagtcttttctctaagatctggaacataacaaggatgtccactttcaacactgttattcaacatagtactggaagtgctagctacagcagcagtaaaacgagaaaaaactaaatggcatccaaattggaaaggaagtcgtcaaattattcttgtttgcagatggtacagtcttatattaagaaaaatctaaagactccaccaaaaaacagtaagaactgataaagttgcaggatataaaatgaacatacaaacatcaatagcatttctatatgccaacagagaatctgaaaaaagagattagaaagtaattccatttacagtagccacaaataaaattaaatatctagacattaacttaaccaaagaagtgaaagatctgtacaatgaaaactataaaacatgaatgaaagacattgaagaggatggctggg

SEQ ID NO: 323 - DNA, 691 bp, synthetic construct
  source 1..691: mol_type = other DNA
cccttgaacttattaaaatcttttataatgtagtacatttactgactgctttcaggcaggcatgaggacctttcactccatttgctccattgtcccttttgaaggattcttgtcatatatataaaacctcttaagacataatgttattgttttatatactctttaatcacctacatctttgcactttaatatttcctaaatttgcattcttctctctgggactagaagacctcagcttagcggttcttttcatgtgggcctgagaaattttctcactttttgtttcactttcattcttgaaggaacgtttcactggttataggatgcaaggttagcggttattctcttctgcatcttcccactgcattgtcttctgaatcttataatttatgtaaaaacattagttgtctgtcttcccattgcttctgtgaaaataatgcatgttttcctctggttgtttttgacattttctttgtgtctgtttctcagcaatttttccatgatatatgctcggagcgggcttacttatcctacaccctgaatctgtagcttgacgtctttttgtcaactttggaaagtttttggcattatctcatcaaatatttcccctgtcctgttcttgctcttctcttgctggagtgcagtcgttcctgtattagacctttgcatcatgttctaggtatttttatct

SEQ ID NO: 324 - DNA, 301 bp, synthetic construct
  source 1..301: mol_type = other DNA
gcggtggctcacgcctgtaatcccagcactttgggaggctgaggcgggtggatcacttgaggtcaggagttcgagaccagcctggccaacatggagaaaccccatctctactaaaaatacaaaaattagctgggcgtggtggctcatgcctgtaatcccagctacttgggaggctgagacaggagaattgcttgaacccaggaggtggaggttgcagtgagccaagaacacactattgcactgcagcctgggtgacagagccagactctgcctgaaaagaaaagaaaagaaaaagaatatg

SEQ ID NO: 325 - DNA, 299 bp, synthetic construct
  source 1..299: mol_type = other DNA
tttttctttgaggtagagtctcactctgtcacctaggctggagtacagtggtgcaatctcagctcactgcaacctctacttcccaggttcaagtgattttcgtgcctcagccacccaagtagctgggattatagccatgcgccaccacacacagctaatttttttgtattttttagtagagatggggttcgccatgttggctaggctggtctcaaactcctggccttaaatgatccacccacctcagcctcccaaattgctgggattgcaagcatgagccatcgcacctggcgcagaac

SEQ ID NO: 326 - DNA, 2458 bp, synthetic construct
  source 1..2458: mol_type = other DNA
tcaactcacagagttgaacaatccttttcatacagcagttttgaatctctctttttgtagaatctccaatggacatttggagcactttggggccttcgctcgaaacgggaatatcttcccataaaaactggacagaagctttatcagaaactactttgggatatgtgctttcaactcacatagttgaacccttcttttgatagagcagttttgaaacactctcattgtagaatctgcaagtggacatctggtgtgctttgaggcctatggagaaaaaggaaatatcttcacataaaaactagacagaagcattctcagaaacttatttttgatgtgtgtactcaactgactcagttacacctttcttttgatagagcagttttgaaacactcttcttgcagaatttataagtggatattaggaaagctttgaggcttttgttggaaacgggaatgtcttcacataaaaaccagacagaagcattctcaggaacatctttgttttacgcgcattcatctcacagacttgaaactttcttttgatagagcagctttgaaacaaactttctgtaaaatttgcaagtggatatttggacagctttgaagcctttgctggaaacgggagtatcttcacataaaaactagatggaaggattctcagacacttccttgggaggtttgcattcaactcaaagagttgaacattccttttcatagagctgttttgaaacactctttttgtagaatctgctagtggacatttggagcaacttgaggcctgtggtgaaaaatgaaataccttcgcataaaaactagacagaatcattctcagaaacttctttgtgatgtgtgtactccactcacagagttgaacatttcttttgatagaacagttttgaaacactcccttgtagaatctgcaggtgtatatttggacagctttgagtctttcattggaaacgggaatatcttctcataaaaactagacagaagcactctcagaaacttctctgtgatgtttgccttcaactctcagagttgatcattctttttcatagagcagttttgaaacactctttttgtagaatctgcaagcggacatttggagcactttgaggcctgtggtaaaaaaggaaatatcttcacatgaaaactagacaggagcattctaagaaacttatttgtgatgtgtacactaaactcacagagttgaacttttcatttgatagagcagttttgaaacactatttttgtgaatcctgcaagtggacatttggagcactttgaggtattctttggaaacgggaatatcttcacataaaaactagaaggaagcattctcagaaacttctttgtgaggtttgcattcaactcacagagttgaacttttcttttgataaagcagttttgaaacacactctgtagaatctgttaatggatatttggacagctttgaggttttcgttggaaacgggactatcttcacataaaaactagacagaagcattctcagaaacttctttgcgatgtttgcattcaactcacagagttgaagattccttttcatagagcagttttgatatgctctttttgtggaatctgcctgaggacattcggagtgctttgaggcctaaggtgaaaaaggaaatatcttcacataaaaactagacagaagcattctcagaaacttctttgtgaagtgtgtactcaactcacagagttaaacctttctttgatagagcagtcttgaaacacacttcttgtagaatttacaagtggatattaagacagctttcaggcttccattggaaatcctgaagatattcgctggaatatcttcacataaattgtagacagaagcattctcagaaacatctttgtgatgtgtgctgttggaactttcctttgatagagcagttttgaaacactctttttgtagaatttgcaagtggatatttggacagctttgaagccttcccaggaaatgagtttatcttcacataaaaactagacagaatcattctcagaaacttctttgtgatgtttggtttaactcacagagttgaacattccttttcatagagcagttttgaaaaacgctttttgtagaatctgcaagtggacatttgcagcgttttgggacccatagtgaataaggaaagatgttcacattaaaactagatagaagcattctcagaaacttctttgtgatgtgtgtactcaacacacagagttgaatctttgttttgacagagcagtttgaaacccttttttgtataatctgcaagtggatatttggatagctttgaggcttccgtcggaaacgggaatatcttcacataaaaactagagagaagcattcctcagaaacttctttgtgaagtttgccttcaactcacagagttgaacattccttttcatagagcagttttgaaacactctttttgtagaatctgcaa

SEQ ID NO: 327 - DNA, 304 bp, synthetic construct
  source 1..304: mol_type = other DNA
caggcctgagcaatggcgggcacccctcccccagcctcgctgccgccttgcagtttgatctcagactgctgtgctagcaatgagcgaggcttcatgggcatggtaccctccgagccaggtgcgggttataatctcctggtgtgccgtttgccaagaccattggaaaagtgcagtattagggtgggagtgacccgattttccaggtgctgtctgtcacccctttctttgactaggaaaggaaattccctgaccccttgtacttcccaggtgaggcgatgcctcgccctgcttcggctcatgctcg

SEQ ID NO: 328 - DNA, 408 bp, synthetic construct
  source 1..408: mol_type = other DNA
cacccaagtcacctcttgaatgctttgctgcttagacatttcttctgccagataccctaaataatctctctcaagttcaaagttccacaaatctctagggcaggggcaaaatgccaccagtctgtttgctaaaacataacaagagtcatctttgctccagttcccaacaaattccttatctccatctgagaccaccttatcctggatttcattgtccatatcattatcagcattttggtcaaagccactccacaagtccctaggaagttccaaactttcccacattttcctgtcttcttctgaggcctccaacctattccaccctctgtctgttacccagttccaaagttgcttctacattttcaggtgtcttttcagcagtgccacactctactggtactaatttac

SEQ ID NO: 329 - DNA, 178 bp, synthetic construct
  source 1..178: mol_type = other DNA
aggcctggcacagtggctcatgcgtgtaatcccaacactgcgggaagctgaggcaggaggatcacttgagcccaggagctcatggctgtagtgagctgtgattgcaccactgcactgcactccagcctgggcaacagcaagaccctgtctccaaaaaaaaaaaacaaaacaaattaat

SEQ ID NO: 330 - DNA, 2122 bp, synthetic construct
  source 1..2122: mol_type = other DNA
ttatggtggacatcattgaataattcatgggctttttcctaattctccttagtccttctagaacacaggtcaacagatgtttgtgactccagtccctatgatctgagttgaggtcccagtggggatccatactggggacagcttgctgaccagtagggaattttccctttctttggctgtcattttatcatttacttgactaagatgccaggtatctccaaactcttgggctgcagctaaagctgcattcttttcattaaaggccagggtttgatctaacaaaagcatgacatctttccaagtgagatcgaaggtttcccctagaccctgtaggacatctatgtacctatcaggatcatctgaaaactttcccaggtctgccttgatctgctttaaatcagagagggagaaggggacatgtacctgggttgggccaaattccccttcccctacagcttgaaggggacgtaaccgatagcccgggggtttttgtggtcctttggagatttctttgcttatttccttctgggcaggggagattagaggaggcttatcattaataggagggggagccatagggaggctaggatatgggactaagctgaaaggtcctcctgggggatgtaaattgcaagctttgcatagtcatgtattctccttcaatgaaaagagtttggacataaggtatttcactccatttgccttccctcttacagaaaaggtcaagctgcaggatagtattgtaatttatacttccctcaggtggccatttttccccatcagagagagaatattggggccaggctgtagggcagaaaaaaatgagccgcctctttttcagggtttgtgggtcaaattggtcccaatggcttaggatgcatttcaaaggtgagcctgttgatgcctgagtgtttcccatctgaaagacaaaaccacctgtggttttggtttgttttgtttctcccccacccacaaacctgcaacggtccctggaccctgctgatcggaatagttgtgctccctgacgcagcagcaaaaatactagttttcctcccagaccacaagggggactgagaaaggtcggatttagtggcccttaccaacgcattctcgaaaacctgcacccttgcctgtcctcctagaccacaaagaggaccgagaaaaatcggatttagtggcccttaccgacacattctcgaaaacccattagagtcctaagcattcacctgttagtattgggaccttaaccatgtcctataaagatgttatgccccccaaatgaagtggagtgccataccctgagggagggaagggatgtccagggttggaagagtgacaccttttgtccttacttatatgaataggaaggatacaatttctgaggctccccatattctagcttcaggaatagcttttgttaggcctgctagtctgaggagggatcctaaaattccagatagtcccccctacgatggggctttgggcaaaaattacgtctttctgattggtgagcctgggtgcctacagaaggtaacagaatcccaaatttatactagaaatcattcttataggagaaactagaaaagcaccagagacagggagtggtttttagaagcaggactagcctggagaagagaggcaaggggaagtttgtctggcaggcgttaggacccagggggcaatggtcagggtagatagaatagatgggcaagtctcgcttgggcgacatgactttgagagttccactcatggccacagggtcaaccaacttgttgttgggaccccggagctgaatggctttcctctctgtcgaccctgggctcagcccagaagtacaggaaaagcggaagctggttccaggcaaaccaacgctaccaactctgaagagtcagggattgttagaaaggcctttcccagaaagcctgacacctgtgtctttagtctggcagctgcgctagtagcttttaactggccgacaggtgcctggtatttagcccccgaattctaaggaaaaataggaaagaatagcaagcgaaaggggtccgatggtactcaccacttggcaataggcgatagtctcacttcttggcgataggcgatggtcccatctgggtcgccaaaa

SEQ ID NO: 331 - DNA, 292 bp, synthetic construct
  source 1..292: mol_type = other DNA
ctttaacctccttgttacgtttgtctcttccagaatcgaagctgtaaaactacaaatggttcttcaaatggagccccagatgcagtccatgactaagatctaccgcggacccctggactggcctgctagcccatgctccaatgttgatgacattgaaggcacccctcccaaggaaatctcaactgcacgacccctactatgccccaattcagcatgaagcagttaagagcggttgtcagccaacctccccaacagcacttgggttttcctgttgagaggtgggactgagaga

SEQ ID NO: 332 - DNA, 338 bp, synthetic construct
  source 1..338: mol_type = other DNA
cagtctttcaggaccagaagagatggattttaggttttccttccactcaatgtattctatatgtaccctaatcaacaaacatgcctggttgtcacaggtagaaggggtctctactctgaatcattcagagaagaaataatcatattctttcgatgctatcactaacacaggaccgtgatccgagacaaccaggttcagttcttgatatgtaaaggaatttgggaaaatatcatctctcaccacaaaatctgtatttttatgtatatttaagcaaaatcctgttttggtcatcattttctttacctttcttctatatccatcctaatctccctttcagc

SEQ ID NO: 333 - DNA, 388 bp, synthetic construct
  source 1..388: mol_type = other DNA
cctatgttagaatagaaaatgtcttcacataaaatctagacagaagcaatctgagatacttctttgtggtgtgtcctttcatctcaaagagttaaaactttcttttgattgagcagttttcaaactctctttttgtagaatctgcaagtggacatttggagcgctttaaggcctgtggtggaaaaggaaatatcttcacctaaaaactagacagaagcaatctgagaaacttctttgtgatgtgtgaattcatttcacagagtaaaacctttcttttgatggagccgttttgaaactctctttttgtagaatctgcaaatggacatttggagttctttgaggcctatggtggaaaaggaaatatcttcacataaaaactagatagaag

SEQ ID NO: 334 - DNA, 770 bp, synthetic construct
  source 1..770: mol_type = other DNA
tcatctcacagagttaaacctttcttttgattgagcagttttgaaactctctttttgtagaatctacaagtggacattgggagctctttgaggcctatgttagaaaaggaaatatcttcacataaaacctagatagaggcaatctgagaaacatctttgtgatgtgtgcattcatctcacggagttaaacctttcttttcgttgagcagtttttaaactgtctttttgtagaatgtgcaagtggacatttggagcgctttttgtcctatggtgggaaaggaagtatcttcacataaaaactagaccgaagaattctgagaaacttctttgtgacgtgtacgttcatctcactgagttgaacctttcttttgattgagcagtttggaaacactctttttgtagaatctgcaagtagacatttggagcgcttttcagcctacggtagaaaaggaaatatcttcacatcacaaagagagagtttcaaaactgctctatcaaaagaaaggtttaaccctgtgcgatgaatgcacatatcacaaagaagtttctcagattgcttctgtctagattttatgtgaagatattcctttttccaccataggcctcaaagcgctccaaatgtccacttgcagattctacaaaaagagtgcttccaaactgctcgatgaaaaaaatggttcaactctgtgagatgaatgcacgcatcacaaagaagtttctcagaatttttctatctagtatttatttgaagatatttcattttccaccat

SEQ ID NO: 335 - DNA, 129 bp, synthetic construct
  source 1..129: mol_type = other DNA
tttcagatagagtcaccctctgtcgcccaggctggagtgcagtggcatgatcttggctcactgcaacctccacctcccaggttcaagcgattctcctgcctcagcctcctgagtagctgggattacaga

SEQ ID NO: 336 - DNA, 1603 bp, synthetic construct
  source 1..1603: mol_type = other DNA
gaactaatttacactcccaccaacagtgtaaaagtgttcctatttttccacaacctctccagcatctgttgtttcctgacattttaatgattgccattctaactggcatgagatggtctcattgtggttttcatttgcatttctctaatgaccagtgatgataagcattttttcatacatctcttggctgcgtaaatgtcttcttttgaaaagtgtctgttcatatcctttgcccattttttgatggggttgttgccttttttcttgtaaatttctttcagttctttgtagcttctggatattagccctttgtcagatggacagattgcaaaaatcttctcccattctgtaggttgcctgttcactctgatgatgatgatagtttctttcgctgtgcagaagctctttagtttaattagatcccatttgtcaattttaactttttttgccattgtttttggtgttttagacatgaagccttttcccatgcctatgtcctgaatggtattgtctaggttttcttctaggatttttatggtcctaggtcttatgtttaagtctttgatcaatcttcagttgatttttgtataatgtgtaaggaaggggtccagtttcagttttctgcatatggccagccagctttcccaacaccatttattaaatagggaatcctttccccatttcttgtgtgtgtcaggtttgtcaaagatcagatggcagtaaatgtgtggtgttatttctgaggcctctgttctgttccattggtctatatatctgttttgataccagtgccatgctgttttggttactgtagacttgtagtatagtttgaagtcaggtagcatgatgcctccagctttgttcttcttgcccaggattttcttggctatgtgggcttttttttggttccatatgaagtttaaaatagttttttccaattctgtgaagaaagtcagtggtagctggatggggagagcattgaatctataaattactttgggcagtaaggccattttcatgatactgattcttcctatccatgagcatgcaaggtttttccatttgtttgtgtcctcttttatttccttgagcagtggtttttgaagaggtccttcatatcccttgtaagttgtattcctaggtattttattctctttgtagcaattgtgaatgagagttcactcatgatttggctctctgttgtctgttattggtgtataggaatgcttgtcattttcgcacattgattttgtatcctgagactttgctgaagttgcttatcagcttaaggaggttttgggctgagacaatgaggtttcctaaatatacaatcatgtcatctgcaaacagagacaatttgacttcctctcttcctatctgaataccctgtatttctttctcttgcctgattgccctggccagaacttccaatactatgttgaataggagtggtaagagagggcatccttgccttgtgctggttttcaaagggaatgcttccagttttttcccccattcagtatgatactggctgtgggtttgtcataaagagctcttattattttgagatatgttccatcaatacctagtttattgagagttt

SEQ ID NO: 337 - DNA, 301 bp, synthetic construct
  source 1..301: mol_type = other DNA
gcggtggctcacgcttgtaatcccagcactttgggaggccgaggtgggcggatcacgaggtcaggagatcaagaccacggtgaaaccccatctctactaaaaatataaaaaattagccgggcgtggtggtgggcgcctgtaatcccagctactcagagaggctgaggcaggagaagggcgtgaacccgggaggcggagcttgtagtgagctgagatcgcgccactgcactccagcaccccagcctgggtgacagagcgagactccgtctcaaaaaaataataataataattaaataaataa

SEQ ID NO: 338 - DNA, 1853 bp, synthetic construct
  source 1..1853: mol_type = other DNA
ccaagaagttcaaactggacagaacccaccacagctccacaaagccactgtagccagactgcctctctacattcctcctctctgggcaggccacctctgaaagaaaggcagcagccccagtcaggggcttatagataaaactcccatctccccgggacagagcacttgggggaaggggcatctgtgggtgcagcttcagcagacttaaacgttcctgtctgctggctctgaagagagcagcagatctcccagcacagcactccagctctcctaagggacagactgcctcctcaagtgtgtccctgaaccctgtgcctcctgactgggagacacctcccagcagggatcgacagacacctcatacaggagagctctggctggcatttggcgggtgcccctctgggacaaagcttccagaggaaagaacaggcagcaatctttgctgttctcagcctctgctggtgatacccatttaaacacagtctggagggggcctccagcaaactccagcagacctgcagaggagaggcctgactgttagaaggaaaactaacaaacagaaaggaatagcatcaacatccacaaaaaggacatccacacaaaaaccccatccaaaggtcaccaacatcaaagaccaaagatagataaatccatgaagatgaggaaaaaacagcgcaaaagggctgaaaattccaaaaaccagaatgcctctactcctcccaaggatcacaactccatgccagcaagggaacaaaactggacggagaatgaatttgaccaactgacagaagtaggtttcagaaggtgggtaacaacaaacccctctgagctaaaggagcatggtctaagccattgcaaggaagctaagaaccttgaaaaaagattagaggaattgctatctagaataaccaatttagagaagaatataaatgatctgatggagctgaaaaacacagcttgagaactttgtgaggcatacacaagattcaatagccaaatcgatcaagcagaagaaaggatatgagaattgaagttcaacttaatgaaataaaatctgaacattaaagtagagataaaagaatgaaaaggaacaaacaaagcctccaagaaatatgggacaatgtgaaaagaccaaacctacgtttcaatggtgtacctgaaagtcatgaagagaatggaaccaagttggaaaacactcttcaggatattatccaggaaaacttccccaacctagcaagagagcccaacactaaaattcaggatacacagagaacactacaaagatactcctcaagaagaccaaccccaagacacataatcatcagattcaccaaggttgaaaggaaggaaaaaatgttaagagcagccagagaaaagggtcaggttacccacaataggaaacccatcagactaacagctgatctctctgcagaaaacctacaagccagaagagagtagggccaatactcaacattcttaaacaaaagaatttttaacccaaaatttcatatccagtcaaactaagcttcataagcaaaggagaaataaaatctcttatggacaagcaaatgctgagagattttgtcaccatcaggcctgccttacaagagctcctgaggaagcactaaatataaaaaggaaaaactggtaccaaccactgcaaaaacataccaaattgtaaagaccatcaacaccatgaagaaatggcatcaaataaagggcaaaataaccaactaacatcataatgacaggatcaaattcacacataacaatattaaccttaaatgtaaatgggctaaatgccccaattaaaaaacacagactggcaaattggaaagagtcaagacaaattg

SEQ ID NO: 339 - DNA, 301 bp, synthetic construct
  source 1..301: mol_type = other DNA
ttttttttttcccagacagaggctcactctgttgcccaggctggagtgcagtggcatgatctcggctcattgcaacctctgccttctagattcaagggattctcctgcctcagcctcccaagtagctgggattacaggcccacaccaccacgcctggctaatttttgtattttgagtagagacggcgtttcatcatgttggctaggcgggtctcgaattcctgacctcaagtgatctgcccgtctccgtctaccaaagtgctgggattacaggcgtgagccaccacgcccggcctgaagcc

SEQ ID NO: 340 - DNA, 361 bp, synthetic construct
  source 1..361: mol_type = other DNA
tagatggagggggaaaaacagggtggggagcgggagggagggaaggttttgcagaaagacggcggttaaaaagtttatgggtagatggagggggaaaagagggtggcaagtgggaggaggaaagagggtgataagggggggaagtgggggtgagcagtagggagagaaggttttgtgaaaaaaatggggagaaaggttttggttagacgggagaaaagagggtaacaagttggggaaggaaaaagagggtagctaggaagaagacaaggttttgcgaaaagatagcggccagaaaagaaagacggtggagaaaggaaagacggtgggtaaaaagtgggtagatggagtggggaaagagggt

SEQ ID NO: 341 - DNA, 129 bp, synthetic construct; identical to SEQ ID NO: 335
  source 1..129: mol_type = other DNA

SEQ ID NO: 342 - DNA, 759 bp, synthetic construct
  source 1..759: mol_type = other DNA
attcagaagacaaatctcacatgcaaagacacacataggctcaaaataagtggatggaggaatatttaccaagcaaatggcaagcaaaaagaaaaagcaggggttgcaatcctagtatctgataaaacaggctttaaaccaagaaagatcaaaaaagacaaagaaggtcattacataatggtaaagggatcaatgcaacaagaagagctaactatcctaaatatatacgcacccaatacaggagcacccagattcataaagtaaattcttagagactacaaagagacttatactcccatacaataatagtgggagattttaacacctcattgttgatattagatcaatgagacagaaaattaacaaggatattcaggacttgaactcagcactggacaaagcagatttaatagacatctacagaactctctacctcagatcaacagaatatacattcttctcagcaccacatagcacttattctaaaattgaccacataattggaagtaaaacactcctcaacgaatgcaaaagaatggaaatcataacaaacagtctctcagaccacagtgcaatcaaattagaactcaggattacgaaacttactcaaaactgcacaactacatggaaactgaacaacctgctcctgaacgactactgggtaaataatgaaatgaaggcagaaataaataagtttttgaaaccaatgagaacaaagacacaacataccagaatctctgggacacagctaaaacagtg

SEQ ID NO: 343 - DNA, 270 bp, synthetic construct
  source 1..270: mol_type = other DNA
tatttttaagcaaagacttagagagagagaggaagttagctatgcacattgtgggtgcggtgtggttagggtggccctgagatagggatatgcctggtgtgtttacggaacagctaagaggccagggaactagaggaaattgagtgggaaggagaagagtaggagattagttttgaaaagcaaatggtttgggaatatggatcatgtaagagcacatgagattttataaggatttcattttactcagggtgaaatgaagaagcactaaaa

SEQ ID NO: 344 - DNA, 284 bp, synthetic construct
  source 1..284: mol_type = other DNA
gttcatgcctgtaatcccagtgcttagggaggccgaggtgggtggattgcttgagcccaggagttcgagaccagcctggacaaaatggcagaaactccatgtctacaaaaaatacaaaaattagccgggcatgatgttctgcgcctgtagtcccagctactcaggaggctgaggtgggaggatcgcttgagcccgggaggcggagtttgcagtgagctgagatgtcactgcattccagcctggcagacagagccagactctgtctcaaaagaaaaaaagaaaaa

SEQ ID NO: 345 - DNA, 384 bp, synthetic construct
  source 1..384: mol_type = other DNA
atggaatactatgtagccctaaaaaaagatgagttcatgtcctttgcagggacatggatgaagctggaaaccatcattctcagcaaactaacacaggaacagaaatccaaacactgcatgttctcactcataagtgggagttgagcaatgagaaaacatggacacagggaggggaacatcacacactggggccttttggggagttgggggctaggggagggataacattaggagaaatacctaatgttatttctcctaatattatttcagcctaatgatgggttgatgggtgcagcaaaccagcatggcccatgtatacctatgtaacaaacctgcatgttctacatatgtatcacagaacttaaagtatgtatatataaaaaa

SEQ ID NO: 346 - DNA, 1243 bp, synthetic construct
  source 1..1243: mol_type = other DNA
ttagtctgatgggcttccctttgtgggttacctgacctttctctctggctgcccttaacattttttccttcatttcaactttggtcagtctgacgattatgtgtcttggggttgctcttctcaaggagtattagtggtgttctctgtatttcctgaatttgaatattggcctgtcttgctacgttggggaggtcctctggataatatcctgaagagtgttttccaacttgattccattcttcccgtcactttcaggtacaccaatcagacgtaagtttggtcttttcacatagtcccatatttcttggagtccttgttcattctttttcattctttttatccctaatcttgtcctgatgctttatttcattaagttgatcttcaatctctgatatcctttcttccgcttgatcgattcggctattaatacttgtgtatgcttcacgaagttctcatgctatgtttttcagctccaccagctcatttatgttcttctctaaactggttactctagttagcaattcctctaaccttttttcaaggttcttagcttccttgcattggattagaacatgcccctttagctcagaggagtttgttattacccaccttctgaagcctacttctgtcaatttgtcaaactcattctctgtccagttttgttcccttgctggcaaggagttgtgatcctttgtagaggaggtattctattttttggaattttcagctattttgccctggtttttcctcatctttgtggatttatctacttttggtctttgatgctggtgaccttcggatggggtttttgtgtgtgtgtcccttttgttgatgttgatgctattcctttctgtttgttagttttccttctaactggcccgtctggtgcaggtctgctggagttttctggaggcccactccagaccctgtttgcctgagtatcaccagcggagcctgcaggacagcaaagattgctgcttgttcctttctctggaagctttatcccagaggggcacctgccagatggcagctggagctctcctgtatgaggtgtctgttgacccctgctgggaggtgtctgccagtcaggaggcacggggtcagggacccacttgaggaggcagtctgtcccttagcagagctcgagcactgtgctgggagatctgcttctcttttcagagccagaaggcaggaatgtttaagtctgtagaactgtgcccacagccgctcctttcccccaggt

SEQ ID NO: 347 - DNA, 298 bp, synthetic construct
  source 1..298: mol_type = other DNA
gccgagcgcggtggctcaagcctgtaatcccaccactttgggaggcaaaggtgggtgaatcacctgaggtcaggagttcgagaccagcctgaccaacatggtgaaaccccatctctactaaaaatacaaaaattagccaggcctggtgtcgggtgcctgtaatcccagctactcaggaggctgagacaggagaatcacttgaacccaggaggtggaggttgcagtaagccgagaccgtgcccattgcactccaatctgggcgacgagagtgaaactccatcttaaaaaaaaaaaaaaa

SEQ ID NO: 348 - DNA, 195 bp, synthetic construct
  source 1..195: mol_type = other DNA
gccattttcacgatattgattcttcctatccatgagcacggaatgtttttccattcgtttctgtcctctcttattgccttgagcagtggtttgtagatctccttgaagaggtccttcacatcctttgtaagttggattcctaggtattttattctctttgtagcaattgtgaatgggagttcactcatgatttca

SEQ ID NO: 349 - DNA, 114 bp, synthetic construct
  source 1..114: mol_type = other DNA
ccttaatagttaatctcctattaataagtaagtgattctttaattaaactttcctcattcaaatggccatatgctttctgtctctcgactagatgctgagtgatatacccccca

1-235. (canceled)

236. A method of reducing uptake of circulating tumor-derived DNA (ctDNA) by target cells in a subject, the method comprising administering to the subject an antagonist of a receptor that is associated with cellular uptake of the ctDNA, thereby reducing the uptake of the ctDNA by the target cells in the subject.

237. The method of claim 236, wherein the antagonist comprises an antibody or an antigen-binding fragment thereof.

238. The method of claim 236, wherein the antagonist comprises an IgG antibody.

239. The method of claim 236, wherein the antagonist comprises a polypeptide.

240. The method of claim 236, wherein the antagonist comprises a small molecule antagonist of the receptor.

241. The method of claim 236, wherein the antagonist comprises DNA.

242. The method of claim 236, wherein the antagonist comprises a nucleic acid sequence identified in circulating tumor DNA (ctDNA), or a derivative thereof.

243. The method of claim 236, wherein the receptor comprises APLP2.

244. The method of claim 236, wherein the receptor comprises PKP4.

245. The method of claim 236, wherein the receptor comprises HLA-A.

246. The method of claim 236, wherein the receptor comprises CD97.

247. The method of claim 236, wherein the receptor comprises Integrin αVβ5.

248. The method of claim 236, wherein the receptor comprises PI4K2A.

249. The method of claim 236, wherein the receptor comprises PTK7A.

250. The method of claim 236, wherein the target cells comprise cancer cells.

251. The method of claim 236, wherein the target cells comprise multiple myeloma cells.

252. The method of claim 236, wherein the target cells comprise pancreatic cancer cells.

253. The method of claim 236, wherein the target cells are cancer cells and the method reduces development of resistance of the cancer cells to a therapeutic agent.

254. A method comprising determining that a biological sample from a subject expresses a receptor that is associated with uptake of ctDNA at a level that is associated with the uptake of the ctDNA.

255. A method of treating a condition in a subject in need thereof, the method comprising administering a therapeutically-effective amount of a therapeutic agent to the subject, wherein the administering is based at least in part on a result of an assay performed on a biological sample from the subject, wherein the assay determined that a receptor associated with uptake of ctDNA is expressed in the biological sample at a level that is associated with the uptake of the ctDNA
